(19) United States
(12) Patent Application Publication
(10) Pub. No.: US 2025/0297258 A1
(43) Pub. Date: Sep. 25, 2025

(54) OLIGONUCLEOTIDE-BASED DELIVERY VEHICLE FOR OLIGONUCLEOTIDES AGENTS AND METHODS OF USE THEREOF

(71) Applicant: Ractigen Therapeutics, Rudong Nantong, Jiangsu (CN)

(72) Inventors: Moorim KANG, Rudong Nantong, Jiangsu (CN); Longcheng LI, Rudong Nantong, Jiangsu (CN); Robert F. Place, Rudong Nantong, Jiangsu (CN)

(21) Appl. No.: 18/577,092

(22) PCT Filed: Apr. 18, 2022
(86) PCT No.: PCT/CN2022/104037

§ 371 Date: Jan. 5, 2024

(30) Foreign Application Priority Data
Jul. 7, 2021 (WO) PCT/CN2021/105081
May 6, 2022 (WO) PCT/CN2022/091076

(51) Int. Cl. C12N 15/113; A61P 25/28

(52) U.S. Cl. CPC C12N 15/1137; A61P 25/28; C12N 2310/11; C12N 2310/14; C12N 2310/314; C12N 2310/315; C12N 2310/321; C12N 2310/3231; C12N 2310/3341; C12N 2310/3519; C12Y 115/01001

(57) ABSTRACT

Provided are nucleic acids, specifically as it relates to an oligonucleotide agent comprising a double-stranded RNA (dsRNA, duplex) and a non-targeting accessory oligonucleotide (ACO) that is covalently tethered to the dsRNA and pharmaceutical use thereof.

### CROSS-REFERENCE TO RELATED APPLICATIONS

[0001] This application claims priority to the filing date of Provisional Patent Application Serial No. PCT/CN2021/105081 filed Jul. 7, 2021 and to the filing date of Provisional Patent Application Serial No. PCT/CN2022/091076 filed May 6, 2022, the disclosure of which application is herein incorporated by reference.

### FIELD OF THE INVENTION

[0002] The present application relates to the technical field of nucleic acids, specifically as it relates to an oligonucleotide agent comprising a double-stranded RNA (dsRNA, duplex) and a non-targeting accessory oligonucleotide (ACO) that is covalently tethered to the dsRNA and pharmaceutical use thereof.

### SEQUENCE LISTING

[0003] The instant application contains a Sequence Listing which has been submitted electronically in computer readable format and is hereby incorporated by reference in its entirety.

### BACKGROUND OF THE INVENTION

[0004] Oligonucleotides are an emerging class of therapeutics currently under active development for the treatment of a wide variety of diseases via a myriad of mechanisms of action (MOA). Major categories of oligonucleotide therapeutics include single-stranded antisense oligonucleotides (ASOs) and duplex (double-stranded) RNAs (dsRNAs). Single-stranded ASOs in the form of“gapmer” can be used to suppress gene expression by degrading target mRNA via an RNase H mechanism. Gapmer ASOs have a central DNA region required to support the RNase H activity and two ribonucleotide wings to increase target binding affinity of the ASOs. Another category ofASOs is steric blockers, which are typically composed uniformly of ribonucleotides and bind to pre-mRNA in the nucleus to alter mRNA splicing by blocking the binding of certain splicing factors to the mRNA.

[0005] dsRNAs can be further classified into two categories: small interfering RNA (siRNA) and small activating RNA (saRNA), both of which require Argonaute (AGO) proteins as their protein partner for function. siRNA binds to target mRNA mainly in the cytoplasm to down-regulate gene expression post-transcriptionally via the RNA interference (RNAi) mechanism. saRNA targets regulatory sequences in the nucleus such as gene promoters to upregulate gene expression at the transcriptional level via the RNAa (RNA activation) mechanism.

[0006] Almost all single gene diseases and most multi-gene diseases are caused by loss, instead of gain, of a gene's function. Loss of function could arise from epigenetic aberrations and genetic mutations, leading to transcriptional silencing and erroneous forms of the transcribed mRNA respectively One of such errors is erroneous splicing of pre-mRNA due to undesired skipping or inclusion of exons, resulting in unfunctional protein when the mRNA is translated. In such instance, ASOs have been used to correct the erroneous splicing events and ultimately to increase the gene's protein output by sterically blocking the protein-RNA binding interactions between splicing machinery components and the pre-mRNA. Several such ASO drugs have been approved by U.S. Food and Drug Administration (FDA), including an exon inclusion ASO SPINRAZA® for the treatment of spinal muscular atrophy (SMA) and 3 exon skipping ASOs for the treatment of Duchenne muscular dystrophy (DMD).

[0007] However, the therapeutic potential of such oligonucleotide modalities is limited by delivery technologies that provide access to target tissues, organs, or cell types. Thus, there is a need for improved oligonucleotide-based delivery mechanisms to address these challenges.

### SUMMARY

[0008] The present application provides a novel oligonucleotide agent comprising a double-stranded RNA (dsRNA, duplex) and a non-targeting accessory oligonucleotide (ACO or single-stranded oligonucleotide) that is covalently tethered to the dsRNA. The agent, by itself, constitutes a system termed oligonucleotide-based delivery vehicle (ODV) with “self-delivering” properties. The present inventors found, surprisingly, when ODV is applied to dsRNA (i.e., siRNA or saRNA), favorable biodistribution and activity are obtained for local administration to selected tissues and systemic delivery across several organs/tissues including liver, muscle, lung, kidney, bladder, brain, spinal cord, heart, eye, spleen, etc. The agent possesses certain benefits associated with single-stranded oligonucleotide therapeutics, for instance, unconventional nucleic acid chemistries and modification patterns conducive to delivery, biodistribution, bioavailability, stability, cellular uptake, and other pharmacological properties without concerns of compromising duplex activity.

[0009] ODV design includes an RNA duplex, such as an siRNA or saRNA, comprised of two complementary or partial complementary strands with one of the strands covalently linked to an ACO having at least 6 nucleotides with or without one or more linker moieties. The RNA duplex targets at least one nucleic acid sequence (e.g., mRNA) and optionally is chemically modified using oligonucleotide chemistry technologies (e.g., 2′fluoro, 2′-O-methyl, phosphorothioate, mesyl phosphoramidate or boranophosphate backbone, LNA, etc.) conducive to in vivo activity, stability, and safety. The ACO component is not designed to specifically target any complementary nucleic acid sequence in the subject to be administrated to. The ACO component can be chemically-modified on its backbone, nucleoside or other positions, e.g., a phosphorothioate, mesyl phosphoramidate or boranophosphate backbone, a 2′-fluoro-2′-deoxynucleoside (2′-F), a 2′-O-methyl (2′-O-Me), a 2′-O-(2-methoxyethyl) (2′-O-MOE), locked nucleic acid (LNA), bridged nucleic acid (BNA), peptide nucleic acid (PNA), 5′-(E)-vinylphosphonate moiety, 5′-methyl cytosine moiety, etc., to impart physiochemical properties conducive to improve the agent's bioavailability and delivery. Covalent linker moieties can be natural or unnatural nucleotides, ethlyglycol, carbohydrates, alkyl chains, or any other linker used to covalently connect any two oligonucleotides positioned on the 3′- or 5′-terminus of one or both of the strands within the RNA duplex.

[0010] Embodiments of the present application are based in part on the surprising discovery that an oligonucleotide agent comprising. (a) a double-stranded oligonucleotide comprising a sense strand and an antisense strand, wherein the antisense strand has complementarity to a target nucleic acid, and (b) a non-targeting single-stranded oligonucleotide, wherein the single-stranded oligonucleotide is 6-22 nucleotides in length, wherein the double-stranded oligonucleotide and the single-stranded oligonucleotide are covalently linked, with or without one or more linking components, to form the oligonucleotide agent.

[0011] In certain embodiments of the present application, the double-stranded oligonucleotide is a small interfering RNA (siRNA) or a small activating RNA (saRNA).

[0012] In certain embodiments, the single-stranded oligonucleotide comprises at least one phosphorothioate (PS) backbone substitution. In certain embodiments, the single-stranded oligonucleotide has at least 10%, at least 20%, at least 30%, at least 40%, at least 50%, at least 60%, at least 70%, at least 80%, at least 90%, at least 95%, or 100% of the phosphodiester bonds substituted with phosphorothioate (PS) bond on the backbone of the nucleotide sequence. In certain embodiments, the single-stranded oligonucleotide has 85-95% or 95-100% PS bond.

[0013] In certain embodiments, the chemical modification in the double-stranded oligonucleotide or the single-stranded oligonucleotide is an addition of a 5′-phosophate moiety at the 5′ end of the nucleotide sequence. In certain embodiments, the chemical modification is an addition of a 5′-(E)-vinvlphosphonate moiety. In certain embodiments, the chemical modification is an addition of a 5′-methyl cytosine moiety at the 5′ end of the nucleotide sequence.

[0014] In certain embodiments, the single-stranded oligonucleotide is RNA, DNA, BNA, LNA or PNA. In certain embodiments, the single-stranded oligonucleotide is 8-16 nucleotides in length. In certain embodiments, the single-stranded oligonucleotide is 10-14 nucleotides in length.

[0015] In certain embodiments of the present application, the sense strand of the double-stranded oligonucleotide in the oligonucleotide agent is at least 10 nucleotides in length. In certain embodiments of the present application, the sense strand has a nucleotide length ranging from 10-60 nucleotides. In certain embodiments, the sense strand has a nucleotide length ranging from 27-41 nucleotides.

[0016] In certain embodiments of the present application, the antisense strand has a nucleotide length ranging from 10-60 nucleotides. In certain embodiments, the antisense strand has a nucleotide length ranging from 19-25 nucleotides.

[0017] In certain embodiments, the single-stranded oligonucleotide comprises a nucleotide sequence that is at least 90% identical to the nucleotide sequence selected from SEQ ID NOs: 1-22.

[0018] The ACO may also has a specific composition of nucleotides. In some embodiments, the ACO may have a certain percentage of adenines within the nucleotide sequence of the ACO. In some embodiment, the percent composition of adenines is from about 35% to about 65%. In some embodiments, the percent composition of cytosines is from about 35% to about 72%. In some embodiments, the percent composition of guanosines is from about 35% to about 65%. In some embodiments, the percent composition of uracil is from about 35% to about 72%. In some embodiments, the percent composition of purines is from about 64% to about 78%. In some embodiments, the percent composition of pyrimidines is from about 64% to about 86%. In some embodiment, the specific combination of purines and pyrimidines is about 42-58% purines and about 42-58% pyrimidines.

[0019] In some embodiments, the nucleotide sequence of the single-stranded oligonucleotide comprises at least about 14%, at least about 28%, at least about 42%, at least about 57%, at least about 71%, at least about 85%, at least about 92%, or about 70-100% of the nucleotides having 2′Ome modification.

[0020] In some embodiments, the nucleotide sequence of the single-stranded oligonucleotide is a palindrome sequence.

[0021] In some embodiments, the single-stranded oligonucleotide comprises a chemically modified nucleotide sequence that is at least 80%, at least 85%, at least 90%, at least 95%, at least 97%, at least 99% homology, or 100% identical to a nucleotide sequence selected from the group of SEQ ID NOs: 1299-1379. In some embodiments, the single-stranded oligonucleotide comprises a chemically modified nucleotide sequence that is having 0, 1, 2 or 3 different chemical modifications than a nucleotide sequence selected from the group consisting of SEQ ID NOs: 1299-1379.

[0022] In some embodiments, the single-stranded oligonucleotide comprises a chemically modified nucleotide sequence that is at least 80%, at least 85%, at least 90%, at least 95%, at least 97%, at least 99% homology, or 100% identical to a nucleotide sequence selected from the group of SEQ ID NOs: 1299-1379. In some embodiments, the single-stranded oligonucleotide comprises a chemically modified nucleotide sequence that is having 0, 1, 2 or 3 different chemical modifications than a nucleotide sequence selected from the group consisting of SEQ ID NOs: 1299-1379.

[0023] In some embodiments, the single-stranded oligonucleotide and the double-stranded oligonucleotide is conjugated without a linking component. In some embodiments, the single-stranded oligonucleotide and the double-stranded oligonucleotide is conjugated with one or more linking components. In some embodiments, the double-stranded oligonucleotide and the single-stranded oligonucleotide are covalently conjugated by a linking component. In some embodiments, the single-stranded oligonucleotide is conjugated to a linking component. In some embodiments, the 5′ end, the 3′ end, or an internal nucleotide of the single-stranded oligonucleotide is conjugated to a linking component. In some embodiments, the double-stranded oligonucleotide comprises a sense strand and an antisense strand, and the single-stranded oligonucleotide is covalently conjugated to the sense strand, the antisense strand, or both the sense and the antisense strands of the double-stranded oligonucleotide by a linking component. In some embodiments, the single-stranded oligonucleotide is covalently conjugated to the 3′ end, the 5′ end, both the 3′ and the 5′ ends, or an internal nucleotide of the sense strand of the double-stranded oligonucleotide. In some embodiments, the single-stranded oligonucleotide is covalently conjugated to the 3′ end, the 5′ end, both the 3′ and the 5′ ends, or an internal nucleotide of the antisense strand of the double-stranded oligonucleotide. In some embodiments, the internal nucleotide in the sense or antisense strand of the double-stranded oligonucleotide is substituted by a linking component, wherein the single-stranded oligonucleotide is covalently conjugated with the linking component.

[0024] In some embodiments, more than one single-stranded oligonucleotides are covalently conjugated to the double-stranded oligonucleotide. In some embodiments, about 2-10 single-stranded oligonucleotides are covalently conjugated to the double-stranded oligonucleotide.

[0025] In some embodiments, more than one double-stranded oligonucleotides are covalently conjugated to the single-stranded oligonucleotides. In some embodiments, about 2-10 double-stranded oligonucleotides are covalently conjugated to the single-stranded oligonucleotides.

[0026] In some embodiments, the linking component conjugated with the nucleotide in the single-stranded oligonucleotide or the double-stranded oligonucleotide, or both the single-stranded oligonucleotide and the double-stranded oligonucleotide through phosphorothioate (PS) bond. In some embodiments, the substituted linking component conjugates with each or both adjacent nucleotides on the double-stranded oligonucleotide through phosphorothioate (PS) bond.

[0027] In some embodiments, the linking component comprises a direct bond, or an oxygen or sulfur atom, or a unit selected from the following group: NR1, C(O), C(O)O, C(O)NR1, SO, SO2, and SO2NH; where R1 is hydrogen, acyl, aliphatic or substituted aliphatic.

[0028] In some embodiments, the linking component is selected from the group consisting of: substituted or unsubstituted alkyl, substituted or unsubstituted alkenyl, substituted or unsubstituted alkynyl, arylalkyl, arylalkenyl, arylalkynyl, heteroarylalkyl, heteroarylalkenyl, heteroarylalkynyl, heterocyclylalkyl, heterocyclylalkenyl, heterocyclylalkynyl, aryl, heteroaryl, heterocyclyl, cycloalkyl, cycloalkenyl, alkylarylalkyl, alkylarylalkenyl, alkylarylalkynyl, alkenylarylalkyl, alkenylarylalkenyl, alkenylarylalkynyl, alkynylarylalkyl, alkynylarylalkenyl, alkynylarylalkynyl, alkylheteroarylalkyl, alkylheteroarylalkenyl, alkylheteroarylalkynyl, alkenylheteroarylalkyl, alkenvlheteroarylalkenyl, alkenylheteroarylalkynyl, alkynylheteroarylalkyl, alkynylheteroarylalkenyl, alkynylheteroarylalkynyl, alkylheterocyclylalkyl, alkylheterocyclylalkenyl, alkylhererocyclylalkynyl, alkenvlheterocyclylalkyl, alkenylheterocyclylalkenyl, alkenylheterocyclylalkynyl, alkynvlheterocyclylalkyl, alkynylheterocyclylalkenyl, alkynylheterocyclylalkynyl, alkylaryl, alkenylaryl, alkynylaryl, alkylheteroaryl, alkenylheteroaryl, alkynylhereroaryl, wherein one or more methylenes are interrupted or terminated by O, S, S(O), SO2, N(R′)2, C(O), cleavable linking group, substituted or unsubstituted aryl, substituted or unsubstituted heteroaryl, and substituted or unsubstituted heterocyclic.

[0029] In some embodiments, the linking component is selected from one or more of an ethylene glycol chain, an alkyl chain, an alkenyl chain, an alkynyl chain, a peptide, carbohydrates, thiol linkage, a phosphodiester, a phosphorothioate, a phosphoramidate, an amide, a carbamate, a tetrazole linkage, and a benzimidazole linkage.

[0030] In some embodiments, the linking component is selected from the group consisting of.
[0031] a) L1 or S18 (spacer-18 linker) (1,1-bis(4-methoxyphenyl)-1-phenyl-2,5,8,11,14,17-hexaoxanonadecan-19-yl (2-cyanoethyl) diisopropylphosphoramidite),
[0032] b) L4 or C6 (spacer-C6 linker) (6-(bis(4-methoxyphenyl)(phenyl)methoxy)hexyl (2-cyanoethyl) diisopropylphosphoramidite);
[0033] c) L6 (1,1-bis(4-methoxyphenyl)-1-phenyl-2,5,8,11,14-pentaoxahexadecan-16-yl (2-cyanoethyl) diisopropylphosphoramidite);
[0034] d) L9 or S9 (spacer-9 linker) (2-(2-(2-(bis(4-methoxyphenyl)(phenyl)methoxy)ethoxy)ethoxy)ethyl (2-cyanoethyl) diisopropylphosphoramidite);
[0035] e) L10 or C3 (spacer-C3 linker) (3-(bis(4-methoxyphenyl)(phenyl)methoxy)propyl (2-cyanoethyl) diisopropylphosphoramidite);
[0036] f) L12(d spacer) ((2R,3S)-2-((bis(4-methoxyphenyl)(phenyl)methoxy)methyl)tetrahydrofuranpar-3-yl (2-cyanoethyl) diisopropylphosphoramidite);
[0037] g) L13 or C12 (spacer-C12 linker) (12-(bis(4-methoxyphenyl)(phenyl)methoxy)dodecyl (2-cyanoethyl) diisopropylphosphoramidite);
[0038] b) L14 (spacer-L14 linker) (((1r,4r)-4-((bis(4-methoxyphenyl)(phenyl)methoxy)methyl)cyclohexyl)methyl (2-cyanoethyl) diisopropylphosphoramidite);
[0039] i) L15 (spacer-L15 linker) (4-(2-(bis(4-methoxyphenyl)(phenyl)methoxy)ethyl)phenethyl (2-cyanoethyl) diisopropylphosphoramidite),
[0040] j) L16 (spacer-L16 linker) (2-(1-(2-(bis(4-methoxyphenyl)(phenyl)methoxy)ethyl)cyclohexyl)ethyl (2-cyanoethyl) diisopropylphosphoramidite);
[0041] k) C6x1 ((2S,3S,4S,5S)-2-((bis(4-methoxyphenyl)(phenyl)methoxy)methyl)-5-methoxy-4-(pent-4-yn-1-yloxy)tetrahydrofuran-3-yl (2-cyanoethyl) diisopropylphosphoramidite);
[0042] l) C6x2 ((2S,3S,4S,5S)-5-((bis(4-methoxyphenyl)(phenyl)methoxy)methyl)-2-methoxy-4-(pent-4-yn-1-yloxy)tetrahydrofuran-3-yl (2-cyanoethyl) diisopropylphosphoramidite),
[0043] m) C6x5 (2-((2-(bis(4-methoxyphenyl)(phenyl)methoxy)ethyl)(pent-4-yn-1-yl)amino)ethyl (2-cyanoethyl) diisopropylphosphoramidite); and
[0044] n) C6x7 ((9H-fluoren-9-yl)methyl (4-((2S,4R)-2-((bis(4-methoxyphenyl)(phenyl)methoxy)methyl)-4-((bis(diisopropylamino)phosphanyl)oxy)pyrrolidin-1-yl)-4-oxobutyl)carbamate).

[0045] In some embodiments, the oligonucleotide agent comprises a nucleotide sequence that is at least 90% identical to the nucleotide sequences selected from the group consisting of.
[0046] a) siSOD1M2-AC2(N22)-S1V3v-Qu5 (SEQ ID NO: 58) and an antisense strand having a nucleotide sequence of SEQ ID NO: 57 that has partial complementarity with the sense strand of siSOD1M2-AC2(N22)-S1V3v-Qu5 (SEQ ID NO: 58);
[0047] b) siSOD1M2-AC2(N15)-S1V3v-Qu5 (SEQ ID NO 60) and an antisense strand having a nucleotide sequence of SEQ ID NO: 57 that has partial complementarity with the sense strand of siSOD1M2-AC2(N15)-S1V3v-Qu5 (SEQ ID NO: 60);
[0048] c) siSOD1M2-AC2(N12)-S1V3v-Qu5 (SEQ ID NO: 62) and an antisense strand having a nucleotide sequence of SEQ ID NO: 57 that has partial complementarity with the sense strand of siSOD1M2-AC2(N12)-S1V3v-Qu5 (SEQ ID NO: 62); and
[0049] d) siSOD1M2-AC2(N6)-S1V3v-Qu5 (SEQ ID NO: 64) and an antisense strand having a nucleotide sequence of SEQ ID NO: 57 that has partial complementarity with the sense strand of siSOD1M2-AC2(N6)-S1V3v-Qu5 (SEQ ID NO 64).
[0050] e) The oligonucleotide agent of any one of claims 1-27, wherein the oligonucleotide agent comprises a nucleotide sequence that is at least 90% identical to the following nucleotide sequences:
[0051] f) siHTT-AC2-S1L1 (SEQ ID NO: 28) and an antisense strand having a nucleotide sequence of SEQ ID NO: 27 that has partial complementarity with the sense strand of siHTT-AC2-S1L1 (SEQ ID NO: 28).

[0052] In some embodiments, the oligonucleotide agent comprises a nucleotide sequence that is at least 90% identical to the nucleotide sequences selected from the group of
[0053] a) siApp-8-AC2(N18)-S1L1V3v (SEQ ID NO: 32) and an antisense strand having a nucleotide sequence of SEQ ID NO: 31 that has partial complementarity with the sense strand of siApp-8-AC2(N18)-S1L1V3v (SEQ ID NO: 32);
[0054] b) siApp-8-AC2(N15)-S1L1V3v (SEQ ID NO: 34) and an antisense strand having a nucleotide sequence of SEQ ID NO: 31 that has partial complementarity with the sense strand of siApp-8-AC2(N15)-S1L1V3v (SEQ ID NO: 34); and
[0055] c) siApp-8-AC2(N12)-S1L1V3v (SEQ ID NO: 36) and an antisense strand having a nucleotide sequence of SEQ ID NO: 31 that has partial complementarity with the sense strand of siApp-8-AC2(N12)-S1L1V3v (SEQ ID NO 36).

[0056] In some embodiments, the sense or antisense strand of the double-stranded oligonucleotide has a nucleotide sequence that is at least 90% identical to the nucleotide sequence selected from the group of: R6-04(20)-S1V1v(CM-4) (SEQ ID NO: 66) or R6-04(20)-S1V1v(CM-4) (SEQ ID NO: 67).

[0057] In some embodiments, the oligonucleotide agent comprises a nucleotide sequence that is at least 90% identical to the nucleotide sequences selected from the group of:
[0058] a) R6-04M1-AC2(18)-S1L1V3v (SEQ ID NO 68) and an antisense strand having a nucleotide sequence of SEQ ID NO: 67 that has partial complementarity with the sense strand of R6-04M1-AC2(18)-S1L1V3v (SEQ ID NO 68),
[0059] b) R6-04M1-AC2(16)-S1L1V3v (SEQ ID NO: 70) and an antisense strand having a nucleotide sequence of SEQ ID NO: 67 that has partial complementarity with the sense strand of R6-04M1-AC2(16)-S1L1V3v (SEQ ID NO: 70);
[0060] c) R6-04M1-AC2(15)-S1L1V3v (SEQ ID NO: 72) and an antisense strand having a nucleotide sequence of SEQ ID NO: 67 that has partial complementarity with the sense strand of R6-04M1-AC2(15)-S1L1V3v (SEQ ID NO: 72);
[0061] d) R6-04M1-AC2(14)-S1L1V3v (SEQ ID NO 74) and an antisense strand having a nucleotide sequence of SEQ ID NO: 67 that has partial complementarity with the sense strand of R6-04M1-AC2(14)-S1L V3v (SEQ ID NO 74),
[0062] e) R6-04M1-AC2(13)-S1L1V3v (SEQ ID NO: 76) and an antisense strand having a nucleotide sequence of SEQ ID NO: 67 that has partial complementarity with the sense strand of R6-04M1-AC2(13)-S1L1V3v (SEQ ID NO: 76);
[0063] f) R6-04M1-AC2(12)-S1L1V3v (SEQ ID NO: 78) and an antisense strand having a nucleotide sequence of SEQ ID NO: 67 that has partial complementarity with the sense strand of R6-04M1-AC2(12)-S1 L1V3v (SEQ ID NO: 78);
[0064] g) R6-04M1-AC2(11)-S1L1V3v (SEQ ID NO 80) and an antisense strand having a nucleotide sequence of SEQ ID NO: 67 that has partial complementarity with the sense strand of R6-04M1-AC2(11)-S1L1V3v (SEQ ID NO 80),
[0065] h) R6-04M1-AC2(10)-S1L1V3v (SEQ ID NO: 82) and an antisense strand having a nucleotide sequence of SEQ ID NO: 67 that has partial complementarity with the sense strand of R6-04M1-AC2(10)-S1L1V3v (SEQ ID NO: 82);
[0066] i) R6-04M1-AC2(9)-S1L1V3v (SEQ ID NO:84) and an antisense strand having a nucleotide sequence of SEQ ID NO: 67 that has partial complementarity with the sense strand of R6-04M1-AC2(9)-S1L1V3v (SEQ ID NO: 84); and
[0067] j) R6-04M1-AC2(8)-S1L1V3v (SEQ ID NO: 86) and an antisense strand having a nucleotide sequence of SEQ ID NO: 67 that has partial complementarity with the sense strand of R6-04M1-AC2(8)-S1L1V3v (SEQ ID NO: 86).

[0068] In some embodiments, the single-stranded oligonucleotide is conjugated to one or more conjugation groups. In some embodiments, the double-stranded oligonucleotide is conjugated to one or more conjugation groups. In some embodiments, the sense strand or the antisense strand of the double-stranded oligonucleotide is conjugated to one or more conjugation groups.

[0069] In some embodiments, the conjugation groups are selected from one or more of: a lipid, a fatty acid, a fluorophore, a ligand, a saccharide, a peptide, and an antibody. In some embodiments, the one or more conjugation groups is selected from: a cell-penetrating peptide, polyethylene glycol, an alkaloid, a tryptamine, a benzimidazole, a quinolone, an amino acid, a cholesterol, glucose and N-acetylgalactosamine.

[0070] In some embodiments, each of the sense strand and the antisense strand independently has a nucleotide length ranging from 15-35 nucleotides.

[0071] In some embodiments, the sense or antisense strand of the double-stranded oligonucleotide has a nucleotide sequence that is at least 90% identical to the nucleotide sequence is siApp-8-S1V1 (SEQ ID NO: 28) or siApp-8-S1V1 (SEQ ID NO: 27).

[0072] In some embodiments, the oligonucleotide agent comprises a small interfering RNA (siRNA), wherein the siRNA comprises a sense strand and an antisense strand to form a duplex structure, wherein the antisense strand comprises a nucleotide sequence comprising at least 10 contiguous nucleotides, with 0, 1, 2 or 3 mismatches, and having at least 85% nucleotide sequence complementarity or homology to a portion of the nucleotide sequence of SEQ ID NO: 895, wherein the oligonucleotide agent is capable of inhibiting expression of superoxide dismutase 1 (SOD1) in a cell.

[0073] In some embodiments, the sense strand of the double-stranded oligonucleotide has a nucleotide sequence that is at least 90% identical to the nucleotide sequence selected from the group consisting of: siSOD1-5 (SEQ ID NO: 357), siSOD1-8 (SEQ ID NO: 358), siSOD1-10 (SEQ ID NO: 359), siSOD1-11 (SEQ ID NO: 360), siSOD-17 (SEQ ID NO: 357), siSOD1-35 (SEQ ID NO: 362), and siSOD1-37 through siSOD1-447 (SEQ ID NOs: 363-624).

[0074] In some embodiments, the antisense strand of the double-stranded oligonucleotide has a nucleotide sequence that is at least 90% identical to the nucleotide sequence selected from the group consisting of: siSOD1-5 (SEQ ID NO: 626), siSOD1-8 (SEQ ID NO: 627), siSOD1-10 (SEQ ID NO: 628), siSOD1-11 (SEQ ID NO: 629), siSOD-17 (SEQ ID NO: 630), siSOD1-35 (SEQ ID NO: 631), and siSOD1-37- through siSOD1-447 (SEQ ID NOs: 632-893).

[0075] In some embodiments, the sense strand of the double-stranded oligonucleotide has a nucleotide sequence that is at least 90% identical to the nucleotide sequence selected from the group of: siSOD1-231-E (SEQ ID NO: 38); siSOD1-23 I-TT (SEQ ID NO: 40); siSOD1-231-M1 (SEQ ID NO: 42); siSOD1-231-S2 (SEQ ID NO: 44); siSOD1-388-E (SEQ ID NO: 46); siSOD1-388-TT (SEQ ID NO: 48), siSOD1-388-M1 (SEQ ID NO: 50), siSOD1-388-S2 (SEQ ID NO: 52); siSOD1M2-L1 (SEQ ID NO: 54); and siSOD1M2-S1V5 (SEQ ID NO. 56).

[0076] In some embodiments, the antisense strand of the double-stranded oligonucleotide has a nucleotide sequence that is at least 90% identical to the nucleotide sequence selected from the group of siSOD1-231-E (SEQ ID NO: 39), siSOD1-231-TT (SEQ ID NO: 41), siSOD1-231-M1 (SEQ ID NO: 43); siSOD1-231-S2 (SEQ ID NO: 45); siSOD1-388-E (SEQ ID NO 47), siSOD1-388-TT (SEQ ID NO: 49); siSOD1-388-M1 (SEQ ID NO: 51); siSOD1-388-S2 (SEQ ID NO: 53), siSOD1M2-L1 (SEQ ID NO: 47); and siSOD1M2-S1V1v-Qu5 (SEQ ID NO: 57).

[0077] In some embodiments, the sense strand of the siRNA has a nucleotide sequence that has at least 85% homology to the nucleotide sequence selected from the group consisting of: DS17-0001 (SEQ ID NO: 384), DS17-0002 (SEQ ID NO: 372), DS117-0003 (SEQ ID NO: 409), DS17-0004 (SEQ ID NO: 357), DS17-0005 (SEQ ID NO: 486), DS17-0029 (SEQ ID NO: 588), DS17-01N3 (SEQ ID NO: 912), DS17-02N3 (SEQ ID NO: 914), DS17-03N3 (SEQ ID NO: 916), DS17-04N3 (SEQ ID NO: 918), DS17-05N3 (SEQ ID NO: 920) and any of SEQ ID NOs: 976-1021.

[0078] In some embodiments, the antisense strand of the siRNA has a nucleotide sequence that has at least 85% homology to the nucleotide sequence selected from the group consisting of: DS17-0001 (SEQ ID NO: 653), DS17-0002 (SEQ ID NO: 641), DS17-0003 (SEQ ID NO: 678), DS17-0004 (SEQ ID NO: 626), DS17-0005 (SEQ ID NO: 755), DS17-0029 (SEQ ID NO: 857), DS17-01N3 (SEQ ID NO: 913), DS17-02N3 (SEQ ID NO: 915), DS17-03N3 (SEQ ID NO: 917), DS17-04N3 (SEQ ID NO: 919), DS17-05N3 (SEQ ID NO 921), and SEQ ID NOs: 1022-1067.

[0079] In some embodiments, the sense strand and the antisense strand of the siRNA have nucleotide sequences that are independently at least 85% homologous to the nucleotide sequence pairs selected from the following groups.

a)
(SEQ ID NO: 384 and SEQ ID NO: 653)
DS17-0001,
b)
(SEQ ID NO: 372 and SEQ ID NO: 641)
DS17-0002,
c)
(SEQ ID NO: 409 and SEQ ID NO: 678)
DS17-0003,
d)
(SEQ ID NO: 357 and SEQ ID NO: 626)
DS17-0004,
e)
(SEQ ID NO: 486 and SEQ ID NO: 755)
DS17-0005,
f)
(SEQ ID NO: 588 and SEQ ID NO: 857)
DS17-0029,
g)
(SEQ ID NO: 912 and SEQ ID NO: 913)
DS17-01N3,
h)
(SEQ ID NO: 914 and SEQ ID NO: 915)
DS17-02N3,
i)
(SEQ ID NO: 916 and SEQ ID NO: 917)
DS17-03N3,
j)
(SEQ ID NO: 918 and SEQ ID NO: 919)
DS17-04N3,
and
k)
(SEQ ID NO: 920 and SEQ ID NO: 921)
DS17-05N3.

[0080] In some embodiments, the sense strand and the antisense strand of the siRNA have nucleotide sequences that is independently at least 85% homologous to the nucleotide sequence pairs selected from the following groups.

a)
(SEQ ID NO: 922 and SEQ ID NO: 923)
DS17-01M3,
b)
(SEQ ID NO: 924 and SEQ ID NO: 925)
DS17-02M3,
c)
(SEQ ID NO: 926 and SEQ ID NO: 927)
DS17-03M3,
d)
(SEQ ID NO: 928 and SEQ ID NO: 929)
DS17-04M3,
and
e)
(SEQ ID NO: 930 and SEQ ID NO: 931)
DS17-05M3.

[0081] In some embodiments, the oligonucleotide agent comprising a siRNA and a non-targeting ACO, wherein the ACO comprises a nucleotide sequence that is at least 90%, at least 95%, or 100% identical to SEQ ID NO 954, and the oligonucleotide agent is capable of inhibiting the expression of superoxide dismutase 1 (SOD1) in a cell.

[0082] In some embodiments, the sense strand and the antisense strand of the siRNA have nucleotide sequences that independently share at least 85% homologous to the nucleotide sequence pairs selected from the following groups.

a)
(SEQ ID NO: 922 and SEQ ID NO: 923)
DS17-01M3,
b)
(SEQ ID NO: 924 and SEQ ID NO: 925)
DS17-02M3,
c)
(SEQ ID NO: 926 and SEQ ID NO: 927)
DS17-03M3,
d)
(SEQ ID NO: 928 and SEQ ID NO: 929)
DS17-04M3,
e)
(SEQ ID NO: 930 and SEQ ID NO: 931)
DS17-05M3,
f)
(SEQ ID NO: 932 and SEQ ID NO: 933)
DS17-01M3-AC1 (me14)-L9V3,
g)
(SEQ ID NO: 934 and SEQ ID NO: 935)
DS17-02M3-AC1 (me14)-L9V3,
h)
(SEQ ID NO: 936 and SEQ ID NO: 937)
DS17-03M3-AC1 (mel4)-L9V3,
i)
(SEQ ID NO: 938 and SEQ ID NO: 939)
DS17-04M3-AC1 (mel4)-L9V3,
j)
(SEQ ID NO: 940 and SEQ ID NO: 941)
DS17-05M3-AC1 (me14)-L9V3,
k)
(SEQ ID NO: 942 and SEQ ID NO: 47)
DS17-29M2-AC1 (me14)-L9V3,
l)
(SEQ ID NO: 932 and SEQ ID NO: 47)
DS17-01M3v-AC1 (me14)-L9V3,
m)
(SEQ ID NO: 934 and SEQ ID NO: 943)
DS17-02M3v-AC1 (mel4)-L9V3,
n)
(SEQ ID NO: 936 and SEQ ID NO: 944)
DS17-03M3v-AC1 (mel4)-L9V3,
o)
(SEQ ID NO: 938 and SEQ ID NO: 950)
DS17-04M3v-AC1 (mel4)-L9V3,
p)
(SEQ ID NO: 940 and SEQ ID NO: 951)
DS17-05M3v-AC1 (me14)-L9V3,
and
q)
(SEQ ID NO: 952 and SEQ ID NO: 939)
DS17-04M3-asSOD1-1-L9V3.

[0083] In some embodiments, the oligonucleotide agent comprises a non-targeting ACO conjugated sense strand of a siRNA and an antisense strand of the siRNA, wherein the non-targeting ACO conjugated sense strand comprises a linking component covalently conjugating the ACO and the sense strand, wherein the antisense strand comprises a nucleotide sequence that is at least 90%, at least 95% homology, or 100% identical to SEQ ID NO: 57. In some embodiments, the non-targeting ACO conjugated sense strand comprises a nucleotide sequence that is at least 90%, at least 95%, or 100% identical to a nucleotide sequences selected from the group consisting of SEQ ID NOs: 1197-1288 and SEQ ID NOs: 1291-1298.

[0084] In some embodiments, the linking component is selected from the linking component group listed in SEQ ID NOs: 1197-1288 in Table 28 and SEQ ID NOs: 1291-1298 in Table 30.

[0085] In some embodiments, the single-stranded oligonucleotide of the oligonucleotide agent improves the stability, bioavailability, biodistribution, and/or cellular uptake of the double-stranded oligonucleotide as compared to an oligonucleotide agent without the single-stranded oligonucleotide.

[0086] In some embodiments, the single-stranded oligonucleotide of the oligonucleotide agent increases the biodistribution of double-stranded oligonucleotide within one or more target tissues as compared to an oligonucleotide agent without the single-stranded oligonucleotide.

[0087] In some embodiments, the one or more target tissues is selected from tissues of brain, spinal cord, muscle, spleen, lung, heart, liver, bladder, and kidney. In some embodiments, the one or more target tissues is selected from the group consisting of: prefrontal cortex, cerebellum, and rest of brain, cervical, thoracic and lumbar in spinal cord; heart, forelimb, hindlimb, nape, and gluteus.

[0088] At least part of the present disclosure provides a siRNA comprising an oligonucleotide sequence having a length ranging from 16 to 35 consecutive nucleotides, wherein the oligonucleotide sequence comprises a nucleotide sequence having at least 75%, at least 80%, at least 85%, at least 90%, at least 95% or 100% homology or complementarity to an equal length portion of SEQ ID NO:59, wherein the siRNA inhibits the mRNA transcript of SOD1 gene by at least 80% as compared to the baseline of SOD1 mRNA level.

[0089] In certain embodiments, the nucleotide sequence has at least 75%, at least 80%, at least 85%, at least 90%, at least 95% or 100% homology or complementarity to an equal length portion of SEQ ID NO: 61 or 63, wherein the oligonucleotide agent inhibits the mRNA transcript of SOD1 gene by at least 80% as compared to the baseline of SOD1 mRNA level.

[0090] Certain embodiments of the present application relate to a hotspot in the 3′ UTR of the SOD1 gene, wherein the hotspot has a nucleic acid sequence selected from SEQ ID NO: 61 (H1) and SEQ ID NO: 63 (H2).

[0091] Certain embodiments of the present application relate to a siRNA target sequence in the mRNA transcript from the 3′-UTR of the SOD1 gene, wherein the target sequence in the mRNA transcript has at least 75%, at least 80%, at least 85%, at least 90%, at least 95% or 100% homology to a sequence selected from SEQ ID NOs:1068-1113.

[0092] Certain embodiments of the present application also relate to a siRNA target sequence in the mRNA transcript from the SOD1 gene, wherein the target sequence in the mRNA transcript has at least 75%, at least 80%, at least 85%, at least 90%, at least 95% or 100% homology to a sequence selected from SEQ ID NOs:88-355.

[0093] Certain embodiments of the present application also relate to a si RNA comprising a sense strand and an antisense strand, wherein the sense strand of the siRNA has a nucleotide sequence that is at least 85%, at least 90%, at least 95% or 100% homology to the nucleotide sequence selected from the group of SEQ ID NOs 976-1021, wherein the siRNA inhibits the mRNA transcript of SOD1 gene by at least 80% as compared to the baseline of SOD1 mRNA level.

[0094] The present disclosure further provides a siRNA comprising a sense strand and an antisense strand, wherein the antisense strand of the siRNA has a nucleotide sequence that is at least 85%, at least 90%, at least 95% or 100% homology to the nucleotide sequence selected from the group of SEQ ID NOs: 1022-1067, wherein the siRNA inhibits the mRNA transcript of SOD1 gene by at least 80% as compared to the baseline of SOD1 mRNA level.

[0095] In some embodiments, the sense strand and the antisense strand of the siRNA have nucleotide sequences that is independently at least 85%, at least 90%, at least 95% or 100% homology to the nucleotide sequence pairs selected from the group of siSOD1-547 through siSOD1-694 (sense strand of SEQ ID NOs: 976-1021, and antisense strand of SEQ ID NOs: 1022-1067, respectively, in Table 22).

[0096] At least part of the present disclosure also relates an antisense oligonucleotide (ASO) comprising an oligonucleotide sequence having a length ranging from 12 to 30 consecutive nucleotides, wherein the oligonucleotide sequence comprises a nucleotide sequence having at least 75%, at least 80%, at least 85%, at least 90%, at least 95% or 100% homology or complementarity to an equal length portion of SEQ ID NO:59, wherein the ASO inhibits the mRNA transcript of SOD1 gene by at least 60% as compared to the baseline of SOD1 mRNA level.

[0097] In some embodiments, the ASO has at least 75%, at least 80%, at least 85%, at least 90%, at least 95% or 100% complementarity to an equal length portion of SEQ ID NO: 65, wherein the ASO inhibits the mRNA transcript of SOD1 gene by at least 60% as compared to the baseline of SOD1 mRNA level.

[0098] Certain embodiments of the present application relate to a hotspot in the 3′ UTR of the SOD1 gene, wherein the hotspot has a nucleic acid sequence of SEQ ID NO: 65 (H3).

[0099] Certain embodiments of the present application relate to an ASO target sequence in the mRNA transcript from the 3′-UTR of the SOD1 gene, wherein the target sequence in the mRNA transcript has at least 75%, at least 80%, at least 85%, at least 90%, at least 95%, at least 97%, at least 99% or 100% homology to the nucleotide sequence selected from group consisting of SEQ ID NOs: 1114-1154.

[0100] Certain embodiments of the present application also relate to an ASO comprising a single-stranded oligonucleotide sequence that is at least 75%, at least 80%, at least 85%, at least 90%, at least 95%, at least 97%, at least 99% homology or 100% identical to the nucleotide sequence selected from group consisting of chemically modified SEQ ID NOs 1155-1195 and their unmodified naked sequences SEQ ID NOs: 1114-1154, wherein the ASO inhibits the mRNA transcript of SOD1 gene by at least 60% as compared to the baseline of SOD1 mRNA level.

[0101] Also provided here are vectors and cells comprising the oligonucleotide agents of the present disclosure. In some embodiments, the cell is a mammalian cell and is optionally a human cell. In some embodiments, the cell is a host cell. In some embodiments, the cell is in vitro. In some embodiments, the cell exists in a mammalian body.

[0102] Certain embodiments of the present application relate to a pharmaceutical composition comprising the oligonucleotide agent comprising (a) a double-stranded oligonucleotide comprising a sense strand and an antisense strand, wherein the antisense strand has complementarity to a target nucleic acid; and (b) a non-targeting single-stranded oligonucleotide, wherein the single-stranded oligonucleotide is 6-22 nucleotides in length, wherein the double-stranded oligonucleotide and the single-stranded oligonucleotide are covalently linked, with or without one or more linking components, to form the oligonucleotide agent. The target nucleic acids can be any target nucleic acid. The target nucleic acid includes, without limitation, a SOD1 gene, a HTT gene, an App gene, a SMN2 gene, etc.

[0103] In certain embodiments of the present application, the pharmaceutical composition comprises at least one pharmaceutically acceptable carrier selected from an aqueous carrier, liposome or LNP, polymer, micelle, colloid, metal nanoparticle, non-metallic nanoparticle, bioconjugates, and polypeptide.

[0104] In certain embodiments, the pharmaceutical composition decreases or silences the transcription of the SOD1 gene or SOD1 protein.

[0105] In certain embodiments, the pharmaceutical composition increases or activates the expression of the HTT, App or SMN2 gene or HTT, App or SMN2 protein.

[0106] Also provided herein are kits comprising the oligonucleotide agents or the pharmaceutical compositions of the present disclosure.

[0107] Certain embodiments relate to kits comprising a pharmaceutical composition of the present disclosure.

[0108] Certain embodiments relate to a method of decreasing or silencing the transcription of a SOD1 gene or protein, comprising administering to a subject a pharmaceutical composition of the present disclosure.

[0109] Certain embodiments relate to a method for treating or delaying the onset or progression of Amyotrophic lateral sclerosis (ALS) in a subject, the method comprising: administering to a subject a pharmaceutical composition of the present disclosure. In certain embodiments, the subject has sporadic ALS (sALS). In certain embodiments, the subject has familial ALS (fALS).

[0110] Certain embodiments of the present application relate to a method for increasing or activating expression of an HTT gene or huntington protein, comprising administering to a subject the pharmaceutical composition.

[0111] Certain embodiments of the present application relate to a method for treating or delaying the onset or progression of Huntington's disease in a subject, the method comprising: administering to the subject the pharmaceutical composition.

[0112] Certain embodiments of the present application relate to a method for treating or delaying the onset or progression spinal muscular atrophy (SMA) in a subject, the method comprising: administering to the subject the pharmaceutical composition.

[0113] Certain embodiments of the present application relate to a method for increasing or activating expression of an App gene or amyloid precursor protein (APP), comprising administering to a subject the pharmaceutical composition.

[0114] Certain embodiments of the present application relate to a method for treating or delaying the onset or progression of APP associated diseases including Cerebral Amyloid Angiopathy App-related (CAA-APP) and Alzheimer Disease (AD) in a subject, the method comprising: administering to the subject the pharmaceutical composition.

[0115] Certain embodiments of the present application relate to a method for increasing or activating expression of SMN2 gene, comprising administering to a subject the pharmaceutical composition.

[0116] Certain embodiments of the present application relate to a method for treating or delaying the onset or progression of spinal muscular atrophy (SMA) in a subject, the method comprising: administering to a subject a pharmaceutical composition of the present disclosure.

[0117] In certain embodiments, the pharmaceutical composition decreases or silences the expression of the SOD1 gene or protein.

[0118] In certain embodiments, the single-stranded oligonucleotide of the oligonucleotide agent improves the stability, bioavailability, biodistribution, and/or cellular uptake of the double-stranded oligonucleotide as compared to an oligonucleotide agent without the single-stranded oligonucleotide.

[0119] In certain embodiments, the single-stranded oligonucleotide of the oligonucleotide agent increases the biodistribution of double-stranded oligonucleotide within one or more target tissues as compared to an oligonucleotide agent without the single-stranded oligonucleotide.

[0120] In certain embodiments, the single-stranded oligonucleotide of the oligonucleotide agent increases the biodistribution of double-stranded oligonucleotide within two or more target cell types in a tissue as compared to an oligonucleotide agent without the single-stranded oligonucleotide. In certain embodiments, the one or more target tissues is selected from the tissues from brain, spinal cord, muscle, spleen, lung, heart, liver, bladder, and kidney. In certain embodiments, the one or more target tissues is selected from the group of: prefrontal cortex, cerebellum, and rest of brain; cervical, thoracic and lumbar in spinal cord; heart, forelimb, hindlimb, nape, and gluteus.

[0121] Certain embodiments of the present application relate to a use of the oligonucleotide agent of the present disclosure, in manufacturing a medicament for treating or delaying the onset or progression of Amyotrophic lateral sclerosis (ALS).

[0122] Certain embodiments of the present application relate to a use of the pharmaceutical composition of the present disclosure in manufacturing a medicament for treating or delaying the onset or progression of Amyotrophic lateral sclerosis (ALS). In certain embodiments, the ALS comprises sporadic ALS (sALS) and/or familial ALS (fALS).

[0123] Certain embodiments of the present application relate to the oligonucleotide agent of the present disclosure for use in treating or delaying the onset or progression of Amyotrophic lateral sclerosis (ALS), optionally, the ALS comprises sporadic ALS (sALS) and/or familial ALS (fALS).

[0124] Certain embodiments of the present application also relate to the pharmaceutical composition of the present disclosure for use in treating or delaying the onset or progression of Amyotrophic lateral sclerosis (ALS), optionally, the ALS comprises sporadic ALS (sALS) and/or familial ALS (fALS).

### BRIEF DESCRIPTION OF THE DRAWINGS

[0125] The novel features of the invention are set forth with particularity in the appended claims. A better understanding of the features and advantages of the present invention will be obtained by reference to the following detailed description that sets forth illustrative embodiments, in which the principles of the invention are employed, and the accompanying drawings (also “figure” and “FIG.” herein), of which

[0126] FIG. 1A-1C is a visual illustration of example ODV structures. Double-stranded RNA (dsRNA) duplex (siRNA or saRNA) is linked to single-stranded accessory oligonucleotides (ACOs) at the 3′- (FIG. 1A), 5′-terminus (FIG. 1B) or an internal position (FIG. 1C) of their passenger (P) strand. Also labeled are the guide (G) strand and linker (L) bridging the ACO to each dsRNA.

[0127] FIG. 2 shows the ESI mass spectrograms and RP-HPLC profiles of purified ODV compounds siSOD1M2-AC2(N22)-S1V3v and siSOD1M2-AC2(N6)-S1V3v in comparison to siRNA duplexes with (siSOD1M2-L1) or without (siSOD1-388-E) linker. All duplexes were conjugated to Quasar 570 (Qu5) dye at the 5′-terminus of passenger strand. RP-HPLC analytics via reverse phase chromatography was performed using an acetonitrile gradient at a flow rate of 1.0 mL/min and detection wavelength set to 260 nm.

[0128] FIG. 3A-3B shows the in vivo knockdown activity of ODV-optimized siRNA (siHTT-AC2-S1L1) on Htt mRNA expression in the brain and spinal cord of C57BL/6 pup mice (PND4). siRNAs were injected via ICV administration at the indicated doses. Saline was injected as a negative control. siHTT-S1V1 lacked ODV composition and served as comparison for siHTT-AC2-S1L1 activity. Mice were sacrificed 3 days after treatment. Brain (FIG. 3A) and spinal cord (FIG. 3B) tissue samples were collected for analysis by RT-qPCR. Htt mRNA levels are mean values of two animals/group (n=2) relative to saline treatment after normalizing to Tbp reference levels.

[0129] FIG. 4 shows in vitro knockdown activity of App mRNA by ODV-siRNAs with ACOs at different lengths. NSC-34 cells were treated with 1 or 10 nM of the indicated siRNAs for 24 hours. Mock treatments were transfected in absence oligonucleotide. dsCon2 served as a non-specific control duplex. App mRNA levels were quantified by RT-qPCR using gene specific primer sets. Tbp was amplified as an internal reference. Shown are the mean expression values of App mRNA relative to Mock treatment after normalizing to Tbp reference levels.

[0130] FIG. 5 shows ACO) impact on in vivo knockdown activity of ODV-siRNAs in the CNS. All siRNAs were administered via ICV injection into C57BL/6 pup mice (PND4) at a 40 mg/kg dose. Saline was injected as a negative control. Mice were sacrificed 3 days after treatment. Brain and spinal cord tissue samples were collected for analysis by RT-qPCR. App mRNA levels are mean values of three animals/group (n=3) relative to saline treatment after normalizing to Tbp reference levels.

[0131] FIG. 6A-6B shows the upregulation of SMN2 mRNA transcripts via ODV-optimized saRNAs in human primary cells. An example saRNA duplex, termed R6-04(20)-S1V1v(CM-4), is an activator of human SMN2 gene expression. Several ODV variants of R6-04(20)-S1V1v(CM-4) were synthesized with ACOs at lengths ranging from 8 to 18 nucleotides. Primary human fibroblasts derived from SMA Type-2 (GM03813 cells) and SMA Type-1 (GM09677 cells) patients were transfected with each ODV-saRNA variant at 25 nM for 3 days. Mock treatments were transfected in absence oligonucleotide. dsCon2 served as a non-specific control duplex. Both full length (SMN2FL) and Δ7 (SUN2Δ7) splicing variants of SMN2 were quantified by RT-qPCR using isoform specific primer sets TBP was amplified as an internal reference. Shown are the mean expression values of SMN2FL and SMN237 transcripts relative to Mock treatment after normalizing to TBP reference levels in GM03813 (FIG. 6A) and GM09677 (FIG. 6B) cells.

[0132] FIG. 7A-7B shows the associated upregulation of SMN2 protein by ODV-saRNA in human primary cells. R6-04(20)-S1V1v(CM-4) and its ODV-saRNA variants were transfected at 25 nM for 3 days into GM03813 and GM09677 patient-derived cells. Mock treatments were transfected in absence oligonucleotide. dsCon2 served as a non-specific control duplex. Whole cell protein extracts were harvested for immunoblot analysis. Total SMN protein levels were detected using an indiscriminate monoclonal antibody that recognized both SMN1 and SMN2 gene product. Immunodetection of α/β-Tubulin served as a protein loading control. Scanning optical densitometry was used to quantify protein band intensity from example immunoblot images (not shown). Shown are relative changes in total SMN protein levels relative to Mock treatment after normalizing to α/β-Tubulin band intensity in GM03813 (FIG. 7A) and GM09677 (FIG. 7B) cells.

[0133] FIG. 8 shows the upregulation of SMN2 mRNA transcripts via ODV-saRNAs in primary mouse hepatocytes (PMH) carrying human SMN2 transgene R6-04(20)-S1V1v(CM-4) and its ODV-saRNA variants were transfected at 25 nM for 3 days in PMH cells derived from a liver harvested from the SMA-like mouse model. Mock treatments were transfected in absence oligonucleotide. dsCon2 served as a non-specific control duplex. Full length (SMN2FL) and Δ7 (SMN23Δ7) splicing variants of the human SMN2 transgene were quantified by RT-qPCR using isoform specific primer sets. Mouse Tbp (nTbp) was amplified as an internal reference Shown are the mean expression values of SMN2FL and SMN2Δ7 transcripts relative to Mock treatment after normalizing to mTbp reference levels FIG. 9 shows high throughput screening data comparing knockdown activity of 268 siRNAs on human SOD1 mRNA. HEK293A cells were transfected with each siRNA duplex at 0.1 and 10 nM for 24 hours Mock treatments were transfected in absence oligonucleotide SOD1 expression levels were quantified by RT-qPCR using gene specific primer sets. TBP was amplified as an internal reference. Shown are the mean expression values of SOD1 mRNA relative to Mock treatment after normalizing to TBP reference levels at both treatment concentrations.

[0134] FIG. 10 shows a general absence of cytotoxicity for the top 30 SOD1 si RNAs in HEK293 A cells. Dose escalating concentrations representing approximate multiples of IC₅₀ (half maximal inhibitory concentration) values were transfected into HEK293A cells. Mock treatments were transfected in absence oligonucleotide. Both mRNA expression levels and cytotoxicity were quantified for each siRNA at every dose by RT-qPCR and PI staining, respectively Plotted is optical density (OD) of PI staining in comparison to SOD1 knockdown relative to Mock treatments.

[0135] FIG. 11 shows SOD1 knockdown by 6 lead siRNAs in a human neuroblastoma cell line SH-SY5Y cells were treated with SOD1 siRNAs (i.e., siSOD1-63, siSOD1-47, siSOD1-104, siSOD1-5, siSOD1-231 and siSOD-388) at 1 and 10 nM for 24 hours. Mock treatments were transfected in absence oligonucleotide. dsCon2 served as a non-specific control duplex SOD1 mRNA levels were quantified by RT-qPCR using gene specific primer sets. TBP was amplified as an internal reference. Shown are the mean expression values of SOD1 relative to Mock treatment after normalizing to TBP.

[0136] FIG. 12A-12B shows Sod1 knockdown of 4 lead siRNAs targeting conserved sequence in mouse motor neuron-like cell lines. NSC-34 and N-2a cells were treated with SOD1 siRNAs (i.e., siSOD1-231, siSOD1-229, siSOD1-388, and siSOD1-387) at 1 and 10 nM for 24 hours Mock treatments were transfected in absence oligonucleotide. dsCon2 served as a non-specific control duplex. Mouse Sod1 levels were quantified by RT-qPCR using gene specific primer sets Mouse Tbp was amplified as an internal reference. Shown are the mean expression values of Sod1 transcript relative to Mock treatment after normalizing to nTbp reference levels in NSC-34 (FIG. 12A) and N-2a (FIG. 12B) cells.

[0137] FIG. 13A-13C shows impact of medicinal chemistry on siSOD1-231 and siSOD1-388 knockdown activity. Chemical modification patterns and duplex structures used to test knockdown activity are depicted in FIG. 13A using siSOD1-388 as model sequence. Modification symbols: Upper case in bold, 2′Ome; lower case, 2′F; chevron (\hat{ }), PS; T, deoxythymidine. Human 239A and mouse NE-4C (neuroepithelial) cells were treated with chemically modified versions of siSOD1-231 (i.e., siSOD1-231-E, siSOD1-231-TT, siSOD1-231-M1, or siSOD1-231-S2) and siSOD1-388 (i.e., siSOD1-388-E, siSOD1-388-TT, siSOD1-388-M1, or siSOD1-388-S2) at 1 and 10 nM for 24 hours. Mock treatments were transfected in absence oligonucleotide. dsCon2 served as a non-specific control duplex. Expression levels of SOD1/Sod1 was quantified by RT-qPCR using species-specific gene primer sets. TBP/Tbp was amplified as an internal reference. Shown are the mean expression values of SOD1/Sod1 transcript relative to Mock treatments after normalizing to internal reference levels in HEK293A (FIG. 13A) and NE-2C (FIG. 13B) cells FIG. 14 shows in vitro knockdown activity of Sod1 mRNA by ODV-optimized siSOD1-388-E [siSOD1M2-AC2(N15)-S1V3v-Qu5]. NSC-34 cells were treated with 0.1 or 1 nM of the indicated siRNAs for 3 days. Mock treatments were transfected in absence oligonucleotide. dsCon2 served as a non-specific control duplex. Sod1 mRNA levels were quantified by RT-qPCR using gene specific primer sets. Tbp was amplified as an internal reference Shown are the mean expression values of Sod1 mRNA relative to Mock treatment after normalizing to Tbp reference levels.

[0138] FIG. 15A-15C shows biodistribution and in vivo knockdown activity of siSOD1M2-AC2(N15)-S1V3v-Qu5 via ICV injection in the organs of pup mice (PND4). Qu5-labeled ODV-siRNA (siSOD1M2-AC2(N15)-S1V3v-Qu5) was administered via ICV injection into C57BL/6 pup mice (PND4) at a 40 mg/kg dose. Injection of a Qu5-labeled siRNA variant siSOD11M2-S1V1v-Qu5, which lacked any accessory oligonucleotide, served as a comparative control. Mice were sacrificed 3 days following treatment and whole organ fluorescence was quantified on an IVIS Imaging System using 520 nm excitation and 570 nm emission filters. FIG. 15A is an example IVIS image depicting siSOD1M2-AC2(N15)-S1V3v-Qu5 biodistribution via Qu5 signal in all major organs comparative to siSOD1M2-S1V1v-Qu5 following ICV injection. FIG. 15B quantifies fluorescence intensity of siSOD1M2-AC2(N15)-S1V3v-Qu5 emitted by each organ. Sod1 mRNA knockdown was quantified in organ tissue via RT-qPCR using gene specific primer sets. Tbp was amplified as an internal reference. FIG. 15C shows Sod1 knockdown in each organ relative to mRNA levels from a non-treated animal after normalizing to Tbp.

[0139] FIG. 16A-16B shows the biodistribution and in vivo knockdown activity of siSOD1M2-AC2(N12)-S1V3v-Qu5 via ICV injection in the organs of adult mice. Qu5-labeled ODV-siRNA (siSOD1M2-AC2(N12)-S1V3v-Qu5) was administered via bilateral ICV injection into adult C57BL/6 mice at a 10 mg/kg total dose. Injection of a Qu5-labeled siRNA variant siSOD1M2-S1V1v-Qu5, which lacked any accessory oligonucleotide, served as a comparative control. Mice were sacrificed 5 days after the injection and whole organ fluorescence was quantified on an IVIS Imaging System using 520 nm excitation and 570 nm emission filters. FIG. 16A quantifies Qu5 signal intensity of siSOD1M2-AC2(N12)-S1V3v-Qu5 emitted from each major organ comparative to siSOD1M2-S1V1v-Qu5 following ICV injection. Sod1 mRNA knockdown was quantified within tissues of the CNS and select peripheral tissues (i.e., muscle and kidney) via RT-qPCR using gene specific primer sets. Tbp was amplified as an internal reference. FIG. 16B shows mean knockdown levels of Sod1 in each of the indicated adult tissues relative to mRNA levels in saline treated animals after normalizing to Tbp.

[0140] FIG. 17 demonstrates ACO length impacts distribution of ODV-siRNA knockdown activity in CNS tissues in vivo. Sod1 ODV-siRNA variants with ACOs at lengths of either 22 nucleotides (siSOD1M2-AC2(N22)-S1V3v-Qu5) or 6 nucleotides (siSOD1M2-AC2(N6)-S1V3v-Qu5) were administered to adult C573L/6 mice via bilateral ICV injection at a 10 mg/kg total dose. Mice were sacrificed 10 days following treatment and Sod1 mRNA knockdown was quantified within different tissues of the CNS and liver via RT-qPCR using gene specific primer sets. Tbp was amplified as an internal reference. Mean expression levels from 2 animals (n=2) are shown in each of the indicated adult tissues relative to mRNA levels in non-treated animals after normalizing to Tbp.

[0141] FIG. 18 shows the inhibiting potency of 6 lead siRNAs on SOD1 mRNA level in SH-SY5Y human neuroblastoma cells. SH-SY5Y cells were treated with SOD1 siRNAs (i.e., DS17-0001, DS17-0002, DS17-0003, DS17-0004, DS17-0005 and DS17-0029) at 0.1 and 1 nM for 24 hours. Mock treatments were transfected in absence of oligonucleotide. dsCon2 served as a non-specific duplex control SOD1 mRNA levels were quantified by RT-qPCR using gene specific primer sets. TBP was amplified as an internal reference. Shown are the mean values of SOD1 mRNA relative to Mock treatment after normalizing to TBP.

[0142] FIG. 19 shows the inhibiting potency of 7 siRNAs on the SOD1 mRNA level in HEK293A cells. HEK293A cells were treated with DS17-04N3 siRNA and 6 prior art siRNAs (DS17-Vo149, DS17-Vo149(c), DS17-Vo153, and DS17-Vo153(c) from U.S. Pat. No. 10,570,395B2; DS17-Al289 and DS17-Al102 from WO2006066203A2) at 0.004, 0.016, 0.063, 0.250, 1.000 and 4.000 nM for 24 hours, respectively. Mock treatments were transfected in absence of oligonucleotide. dsCon2 served as a non-specific duplex control Mock and dsCon2 data are not shown. SOD1 mRNA levels were quantified by RT-qPCR using gene specific primer sets. TBP was amplified as an internal reference. Shown are the mean values of SOD1 mRNA relative to Mock treatment after normalizing to TBP.

[0143] FIG. 20A-20B show the inhibiting potency of 9 siRNAs on the SOD1 mRNA levels in HeLa and HEK293A cells. HeLa and HEK293A cells were treated with DS17-02N3 siRNA and 8 prior art siRNAs (DS17-Vo195&60 and DS17-Vo195 (D-2763) from US20170314028A1, and DS17-Al148, DS17-Al194, DS17-Al290, DS17-Al405, DS17-Al447 and DS17-Al600 from WO2006066203A2) at 0.004, 0.016, 0.063, 0.250, 1.000 and 4.000 nM for 24 hours. respectively FIG. 20A shows the SOD1 mRNA level in HeLa cells. FIG. 20B shows the SOD1 mRNA level in HEK293A cells. Mock treatments were transfected in absence of oligonucleotide. dsCon2 served as a non-specific duplex control. Mock and dsCon2 data are not shown. SOD1 mRNA levels were quantified by RT-qPCR using gene specific primer sets. TBP was amplified as an internal reference. Shown are the mean values of SOD1 relative to Mock treatment after normalizing to TBP.

[0144] FIG. 21A-21B show the inhibiting potency of 5 lead siRNAs with chemical modification on the SOD1 mRNA levels in T98G and HEK293A cells T98G and HEK293A cells were treated with SOD1 siRNAs (i.e., DS17-01M3, DS17-02M3, DS17-03M3, DS17-04M3 and DS17-05M3) at 0.002, 0.005, 0.015, 0.046, 0.137, 0.412, 1.235, 3.704, 11.111, 33.333 and 100 nM for 24 hours, respectively. FIG. 21A shows the SOD1 mRNA level in T98G cells. FIG. 21B shows the SOD1 mRNA level in HEK293A cells. Mock treatments were transfected in absence of oligonucleotide. dsCon2 served as a non-specific duplex control. Mock and dsCon2 data are not shown. SOD1 mRNA levels were quantified by RT-qPCR using gene specific primer sets. TBP was amplified as an internal reference. Shown are the mean values of SOD1 relative to Mock treatment after normalizing to TBP.

[0145] FIG. 22A-22B show the inhibiting potency of 4 lead ODV-siRNAs with chemical modification on the SOD1 mRNA level in HEK293A cells. Cells were treated with 4 SOD1 ODV-siRNAs (i.e., DS17-02M3-AC1(me14)-L9V3, DS17-03M3-AC1(me14)-L9V3, DS17-04M3-AC1(me14)-L9V3 and DS17-29M2-AC1(me14)-L9V3) at 0.00002, 0.00009, 0.00037, 0.0015, 0.0059, 0.023, 0.094, 0.375, 1.5 and 6 nM for 24 hours, respectively. FIG. 22A shows the SOD1 mRNA level in HEK293A cells. FIG. 22B shows the caspase 3/7 activity in HEK293A cells Mock treatments were transfected in absence of oligonucleotide. dsCon2 served as a non-specific duplex control. Mock and dsCon2 data are not shown. SOD1 mRNA levels were quantified by RT-qPCR using gene specific primer sets TBP was amplified as an internal reference. Shown are the mean values of SOD1 relative to Mock treatment after normalizing to TBP. Caspase 3/7 activity was detected using caspase 3/7 activity kit.

[0146] FIG. 23A-23B show the in vivo inhibiting potency of ODV-siRNA leads on the SOD1 mRNA level via ICV injection in CNS of adult SOD1^{G93A} mice. 3 ODV-siRNA s (i.e., DS17-01M3-AC1(me14)-L9V3, DS17-04M3-AC1(me14)-L9V3 and DS17-05M3-AC1(me14)-L9V3) were administered via unilateral ICV injection into adult SOD1^{G39A} mice on postnatal day (PND) 46 at a 0.4 mg total dose. An ODV-duplex dsCon2M3-AC1(me14)-L9V3 served as a non-specific duplex control, asSOD1-1 (Tofersen) was also injected at the same dose as a positive control. Mice were sacrificed 7 days after the treatment and SOD1 mRNA knockdown was quantified in different tissues of the CNS via RT-qPCR using gene specific primer sets. FIG. 23A shows the SOD1 mRNA level in different brain tissues. FIG. 23B shows the SOD1 mRNA level in different spinal cord tissues. Tbp was amplified as an internal reference. Mean mRNA levels of 4 animals (n=4) each treatment group are shown by indicated tissues relative to non-treated group after normalizing to Tbp.

[0147] FIG. 24A-24B show the latency and body weight change of adult SOD1^{G93A} mice after ICV injection with siRNA. ODV-siRNA (DS17-04M3-AC1(me14)-L9V3) was administered via unilateral ICV injection into adult SOD1^{G93A} mice on PND 46 at a 20 nmole total dose. FIG. 24A shows the efficacy by rotarod behavior test after PND 68. FIG. 24B shows the body weight fluctuation after the injection at PND 46 (normalized as day 0). Tofersen was injected at a 20 nmole dose as a positive control. Artificial CSF (aCSF) was injected as a non-treated negative control. Mean SOD1 mRNA levels of 4 animals (n=4) are shown in each treatment.

[0148] FIG. 25 shows the siRNA concentration in adult SOD1^{G93A} mouse brain after ICV injection. An ODV-siRNA (DS17-04M3-AC1(me14)-L9V3) was administered via unilateral ICV injection into adult SOD1^{G93A} mice on PND 46 at a 0.4 mg total dose. The mice were sacrificed at 1-, 7-, 28- and 56-days following treatment and the concentration of DS17-04M3-AC1(me14)-L9V3 was quantified in different brain tissues via stem-loop RT-qPCR using gene specific primer sets. Mean values of siRNA concentrations from 3 animals (n=3) are shown in each treatment.

[0149] FIG. 26 shows the in vivo inhibiting potency of an ODV-siRNA lead on the SOD1 mRNA levels in different CNS tissues via ICV injection in adult SOD1^{G93A} mice. An ODV-siRNA (DS17-04M3-AC1(me14)-L9V3) was administered on PND 46 days via unilateral ICV injection at 0.1-, 0.4-, 1- and 1.6-mg total dose, aCSF was injected as a non-treated negative control. Mice were sacrificed at 14 days following treatment and SOD1 mRNA knockdown was quantified in different CNS and liver tissues via RT-qPCR using gene specific primer sets. Tbp was amplified as an internal reference. Mean SOD1 mRNA levels of 1-3 animals (n=1˜3) are shown in each of the indicated tissues relative to mRNA levels in non-treated group after normalizing to Tbp.

[0150] FIG. 27 shows the in vitro inhibiting potency of ODV-siRNA leads on the SOD1 mRNA level in T98G cells. T98G cells were treated with 5 SOD1 ODV-siRNAs (i.e., DS17-01M3v-AC1(me14)-L9V3, DS17-02M3v-AC1(me14)-L9V3, DS117-03M3v-AC1(me14)-L9V3, DS17-04M3v-AC1(me14)-L9V3 and DS17-05M3v-AC1(me14)-L9V3) at 0.0003, 0.0011, 0.0044, 0.0176, 0.0703, 0.2813, 1.1250, 4.5 and 18 nM for 24 hours, respectively. Mock treatments were transfected in absence of oligonucleotide. dsCon2 served as a non-specific duplex control. Mock and dsCon2 data are not shown SOD1 mRNA levels were quantified by RT-qPCR using gene specific primer sets. TBP was amplified as an internal reference. Shown are the mean SOD1 mRNA values relative to Mock treatment after normalizing to TBP

[0151] FIG. 28 shows the in vivo inhibiting potency of ODV-siRNA leads on the SOD1 mRNA level via ICV injection in adult SOD1^{G93A} mice. 5 ODV-siRNA s (i.e., DS17-01M3v-AC1(me14)-L9V3, DS117-02M3v-AC1(me14)-L9V3, DS117-03M3v-AC1(me14)-L9V3, DS17-04M3v-AC1(me14)-L9V3 and DS17-05M3v-AC1(me14)-L9V3) were administered via unilateral ICV injection into adult SOD1^{G93A} mice on PND 46 at a 0.2 mg total dose, aCSF was injected as a non-treated negative control DS17-04M3(Scr)-AC1(me14)-L9V3 was served as a non-specific duplex control. Mice were sacrificed 14 days following treatment and SOD1 mRNA knockdown was quantified in different CNS and liver tissues via RT-qPCR using gene specific primer sets. Tbp was amplified as an internal reference. Mean SOD1 mRNA levels from 2˜4 animals (n=2˜4) are shown in each of the indicated tissues relative to mRNA levels in non-treated group after normalizing to Tbp.

[0152] FIG. 29A-29C show the in vivo inhibiting potency of different ODV-siRNA leads on the SOD1 mRNA level via ICV injection in adult SOD1^{G93A} mice. Two ODV-siRNAs (DS17-04M3-AC1(me14)-L9V3 and DS17-04M3v-AC1(me14)-L9V3) were administered on PND 46 via unilateral ICV injection, aCSF was injected as a non-treated negative control. FIG. 29A shows the SOD1 mRNA transcript level in different tissues at a low dose (0.2 mg) after treatment for 14 days. FIG. 29B shows the SOD1 mRNA transcript level in different tissues at a high dose (0.4 mg) after treatment for 14 days. FIG. 29C shows the SOD1 mRNA transcript level in different tissues at a high dose (0.4 mg) after treatment for 56 days. Mice were sacrificed at 14- and 56-days following treatment and SOD1 mRNA knockdown was quantified in different CNS and liver tissues via RT-qPCR using gene specific primer sets. Tbp was amplified as an internal reference Mean SOD1 mRNA levels from 2˜4 animals (n=2˜4) are shown in each of the indicated tissues relative to mRNA levels in non-treated group after normalizing to Tbp.

[0153] FIG. 30A-30G show the in vivo inhibiting potency of ODV-siRNA leads on the SOD) mRNA transcript level via ICV injection in adult SOD1^{G93A} mice ODV-siRNAs (DS17-04M3-AC1(me14)-L9V3 and DS17-04M3v-AC1(me14)-L9V3) were administered on PND 46 via unilateral ICV injection at a at 20 nmole total dose. Tofersen was injected at same dose as a positive control, aCSF was injected as a non-treated negative control FIG. 30A, FIG. 30B, FIG. 30C, FIG. 30D, FIG. 30E, FIG. 30F and FIG. 30G show the SOD1 mRNA levels in Brain-frontal cortex, Brain-cerebellum, Rest of brain, Spinal cord-cervical, Spinal cord-thoracic, Spinal cord-lumbar and liver tissues, respectively. Mice were sacrificed at 2- and 8-weeks following treatment and SOD1 mRNA knockdown was quantified in different CNS and liver tissues via RT-qPCR using gene specific primer sets. Tbp was amplified as an internal reference. Mean SOD1 mRNA levels of 4 animals (n=4) are shown in each of the indicated tissues relative to mRNA levels in non-treated group after normalizing to Tbp.

[0154] FIG. 31A-31C show the immunostimulatory activity of SOD1 ODV-siRNA in ICR mice. ICR mice were treated with DS17-04M3, AC1-L9V3 and DS17-04M3-AC1(me14)-L9V3 at 10.18 nmole (low dose) and 40.71 nmole (high dose) by SC injection, respectively. Treatment with saline alone served as a vehicle control to establish baseline levels. Mice were sacrificed 8 hours after treatment in serum were harvested to detect the IL-1β (FIG. 31A), IFN-γ (FIG. 31B) and TNF-α (FIG. 31C) protein levels by ELISA assay as described in ELISA assay of Materials and Methods.

[0155] FIG. 32A-32C show levels of ALT (32A), AST (32B) and CREA (32C) in ICR mouse after SC injection of DS17-04M3, AC1-L9V3 and DS17-04M3-AC1(me14)-L9v3. The indicated test compounds were administered via SC injection into ICR mice at 10.18 nmole and 40.71 nmole, respectively. Serum levels of ALT (FIG. 32A), AST (FIG. 32B) and CREA (FIG. 32C) was detected by using their specific detection kits as described in Materials and Methods FIG. 33A-333 show screening data comparing knockdown activity of 46 siRNAs targeting human SOD1 3′UTR HEK293A cells were transfected with each siRNA duplex at 0.1 and 1 nM for 24 hours. FIG. 33A shows SOD1 mRNA expression levels of 46 siRNAs sorted by location in HEK293A cells. FIG. 33B shows SOD1 mRNA levels of 46 si RNAs sorted by activity on 3′UTR in HEK293A cells. Mock treatments were transfected in absence of oligonucleotide. dsCon2 served as a non-specific duplex control. Mock and dsCon2 data are not shown. SOD1 mRNA levels were quantified by RT-qPCR using gene specific primer sets. TBP and HPRT were amplified as internal reference. Shown are the mean expression values of SOD1 mRNA relative to Mock treatment after normalizing to TBP and HPRT1 reference levels at both treatment concentrations. The value (y-axis) shows the fold changes in SOD1 mRNA expression levels by each of the siRNAs relative to Mock treatment after normalized to TBP and HPRT1 siRNAs are sorted on x-axis by their location on the 3′UTR from 540 bp and 700 bp downstream of SOD1 transcription start site (TSS). Locations of the 2 siRNA hotspot regions were marked as H1 to H2 in rectangular dotted boxes.

[0156] FIG. 34. shows the dose dependent characterization for the candidates of SOD1 in HEK293A cells. siRNAs were transfected into HEK293A cells in dose escalated concentrations representing approximate multiples of IC₅₀ (half maximal inhibitory concentration) values Mock treatments were transfected in absence of oligonucleotide (not shown). SOD1 mRNA expression levels were quantified by RT-qPCR using gene specific primer sets. TBP and HPRT1 were amplified as internal reference Shown are the mean expression values of SOD1 mRNA relative to Mock treatment after normalizing to TBP and HPRT1 reference levels at both treatment concentrations.

[0157] FIG. 35A-35B show screening data comparing knockdown activity of ASOs targeting human SOD1 3′UTR. HEK293A cells were transfected with 16 ASOs at 5 nM and 50 nM, and 33 ASOs at 3.125, 12.5, 50 and 200 nM for 24 hours. FIG. 35A show SOD1 mRNA levels of 16 ASOs in HEK293A cells FIG. 35B show SOD1 mRNA levels of 33 ASOs in HEK293A cells. Mock treatments were transfected in absence of oligonucleotide. dsCon2 served as a non-specific duplex control. Mock and dsCon2 data are not shown. SOD1 mRNA levels were quantified by RT-qPCR using gene specific primer sets TBP and HPRT1 were amplified as internal reference. Shown are the mean expression values of SOD1 mRNA relative to Mock treatment after normalizing to TBP and HPRT1 reference levels at both treatment concentrations. The value (y-axis, log 2) shows the fold changes in SOD1 mRNA expression levels by each of the ASOs relative to Mock treatment after normalized to IBP and HPRT1. ASOs are sorted on x-axis by their location on the 3′UTR from 544 bp and 576 bp downstream of SOD1 transcription start site (TSS). Locations of the 1 ASO hotspot region was marked as H3 in rectangular dotted boxes.

[0158] FIG. 36A-36C. show the dose-dependent characterization for the candidates of SOD1 ASOs in HEK293A cells. ASOs were transfected into HEK293A cells in dose escalated concentrations representing approximate multiples of IC50 (half maximal inhibitory concentration) values. Mock treatments were transfected in absence of oligonucleotide (not shown). FIG. 36A show the mRNA expression levels, FIG. 36B show the apoptosis and FIG. 36C show the cytotoxicity were quantified for each ASO at every dose by RT-qPCR, Caspase 3/7 kit (G8092, Promega) and CCK8 kit (CKO4, Dojindo, Japan) in HEK293A cells, respectively.

[0159] FIG. 37A-37B show screening data for knockdown activity and cytotoxicity of 90 ODV-siRNA designs by free uptake in PMH cells. The indicated ODV-siRNAs were added to PMH cell culture media at 0.1 μM and 1 μM final concentration. The cells were then incubated for 3 days. RD-12556 and RD-12559 served as duplex control and ODV control, respectively Mock was treated in absence of oligonucleotide and not shown. FIG. 37A shows Sod1 mRNA levels by each of the ODV-siRNAs in PMH cells. Sod1 mRNA levels were quantified by RT-qPCR using gene specific primer sets. Tbp and Hprt1 were amplified as internal reference. The value (y-axis) shows the mean expression values of Sod1 mRNA relative to Mock treatment after normalizing to Tbp and Hprt1 reference levels at both treatment concentrations. FIG. 37B shows cytotoxicity levels of 90 ODV-siRNAs in PMH cells by PI staining. A microplate reader system (Infinite M2000 Pro) was used to detect the optical density (OD) of PI staining at 535 nm excitation and 615 nm emission wavelengths. The value (y-axis) shows the mean values of PI staining by each of the ODV-siRNAs at both concentrations relative to Mock. Total 90 ODV-siRNAs are marked as (A) to (L) in 12 different rectangular dotted boxes. The rectangular dotted boxes stand for various design groups with different linkers (A), Palindromic AC1 sequence variants (B), varying numbers of PS modification (C), varying numbers of 2′Ome (D), varying ACO sizes (E), adenine-rich sequence composition (F), cytosine-rich sequence composition (G), guanine-rich sequence composition (H), uracil-rich sequence composition (1), purines-rich sequence composition (J), pyrimidines-rich sequence composition (K) and balanced purines/pyrimidine composition (L).

[0160] FIG. 38 shows the effect of various ODV linkers used in ODV-siRNAs, as indicated in group (A) of FIG. 37, on in vitro knockdown activity in PMH cells. Group A (Linker group) included 10 compounds (i.e., RD-12941, RD-12942, RD-12943, RD-12944, RD-12945, RD-12947, RD-12948, RD-12949, RD-12950 and RD-12951) RD-12556 and RD-12559 served as duplex control and ODV control, respectively. FIG. 38 shows the Sod1 mRNA levels in PMH cells after free uptake treatments of ODV-siRNAs at 0.1 μM and 1 μM for 3 days. Mock was treated in absence of oligonucleotide and not shown. Sod1 mRNA levels were quantified by RT-qPCR using gene specific primer sets. Tbp and Hprt1 were amplified as internal reference. The value (y-axis) shows the mean expression values of Sod1 mRNA relative to Mock treatment after normalizing to T bp and Hprt1 reference levels at both treatment concentrations.

[0161] FIG. 39 shows the effect of different palindromic AC1 sequence used in ODV-siRNAs, as indicated in group (B) of FIG. 37, on in vitro knockdown activity in PMH cells. Group 13 (palindromic AC1 sequence group) included 15 compounds containing sequence derivatives based on the exemplary ACO called AC1 (i.e., RD-12952, RD-12953, RD-12954, RD-12955, RD-12956, RD-12957, RD-12958, RD-12959, RD-12960, RD-12961, RD-12962, RD-12963, RD-12964, RD-12965, and RD-12966). RD-12556 and RD-12559 served as duplex control and ODV control, respectively FIG. 39 shows the Sod) mRNA levels in PMH cells after free uptake treatments of ODV-siRNAs at 0.1 μM and 1 μM for 3 days Mock was treated in absence of oligonucleotide and not shown. Sod) mRNA levels were quantified by RT-qPCR using gene specific primer sets. Tbp and Hprt1 were amplified as internal reference. The value (y-axis) shows the mean expression values of Sod1 mRNA relative to Mock treatment after normalizing to Tbp and Hprt1 reference levels at both treatment concentrations.

[0162] FIG. 40 shows the effect of PS modification used in ODV-siRNAs, as indicated in group (C) of FIG. 37, on in vitro knockdown activity in PMH cells Group C (PS modification group) included 6 compounds (i.e., RD-12967, RD-12968, RD-12969, RD-12970, RD-12971 and RD-12972) each with the same 14-nt ACO containing either 2, 4, 6, 8, 10 or 12 PS modifications, respectively RD-12556 and RD-12559 served as duplex control and ODV control, respectively. FIG. 40 shows the Sod1 mRNA levels in PMH cells after free uptake treatments of ODV-siRNAs at 0.1 μM and 1 μM for 3 days. Mock was treated in absence of oligonucleotide and not shown. Sod1 mRNA levels were quantified by RT-qPCR using gene specific primer sets. Tbp and Hprt1 were amplified as internal reference. The value (y-axis) shows the mean expression values of Sod1 mRNA relative to Mock treatment after normalizing to Tbp and Hprt1 reference levels at both treatment concentrations.

[0163] FIG. 41 shows the effect of 2′Ome modification used in ODV-siRNAs, as indicated in group (D) of FIG. 37, on in vitro knockdown activity in PMH cells. Group D (2′Ome modification group) included 7 compounds (i.e., RD-12973, RD-12974, RD-12975, RD-12976, RD-12977, RD-12978 and RD-12979) each with the same 14-nt ACO containing either 2, 4, 6, 8, 10 or 12 substitutions of 2′MOE chemistry for 2′Ome, respectively. RD-12556 and RD-12559 served as duplex control and ODV control, respectively. FIG. 41 shows the Sod) mRNA levels in PMH cells after free uptake treatments of ODV-siRNAs at 0.1 μM and 1 μM for 3 days. Mock was treated in absence of oligonucleotide and not shown. Sod1 mRNA levels were quantified by RT-qPCR using gene specific primer sets. Tbp and Hprt1 were amplified as internal reference. The value (y-axis) shows the mean expression values of Sod1 mRNA relative to Mock treatment after normalizing to Tbp and Hprt1 reference levels at both treatment concentrations.

[0164] FIG. 42 shows the effect of various ACO size used in ODV-siRNAs, as indicated in group (E) of FIG. 37, on in vitro knockdown activity in PMH cells. Group E (ACO size group) included 8 compounds (i.e., RD-12980, RD-12981, RD-12982, RD-12983, RD-12984, RD-12985, RD-12986 and RD-12987) derived by truncating the 14-nt ACO in RD-12559 to 13, 12, 11, 10, 9, 8, 7, or 6 nucleotides in length, respectively. RD-12556 and RD-12559 served as duplex control and ODV control, respectively FIG. 42 shows the Sod) mRNA levels in PMH cells after free uptake treatments of ODV-siRNAs at 0.1 μM and 1 μM for 3 days. Mock was treated in absence of oligonucleotide and not shown. Sod1 mRNA levels were quantified by RT-qPCR using gene specific primer sets. Tbp and Hprt1 were amplified as internal reference. The value (y-axis) shows the mean expression values of Sod1 mRNA relative to Mock treatment after normalizing to Tbp and Hprt1 reference levels at both treatment concentrations.

[0165] FIG. 43 shows the effect of Adenine rich used in ODV-siRNAs, as indicated in group (F) of FIG. 37, on in vitro knockdown activity in PMH cells. Group F (Adenine rich group) included 5 compounds (i.e., RD-12988, RD-12989, RD-12990, RD-12991, and RD-12992) each with a different 14-nt ACO sequence containing either 5, 6, 7, 8, or 9 total adenine nucleotides, respectively. RD-12556 and RD-12559 served as duplex control and ODV control, respectively. FIG. 43 shows the Sod1 mRNA levels in PMH cells after free uptake treatments of ODV-siRNAs at 0.1 μM and 1 μM for 3 days. Mock was treated in absence of oligonucleotide and not shown. Sod1 mRNA levels were quantified by RT-qPCR using gene specific primer sets. Tbp and Hprt1 were amplified as internal reference. The value (y-axis) shows the mean expression values of Sod1 mRNA relative to Mock treatment after normalizing to Tbp and Hprt1 reference levels at both treatment concentrations.

[0166] FIG. 44 shows the effect of Cytosine rich used in ODV-siRNAs, as indicated in group (G) of FIG. 37, on in vitro knockdown activity in PMH cells. Group G (Cytosine rich group) included 6 compounds (i.e., RD-12993, RD-12994, RD-12995, RD-12996, RD-12997, and RD-12997) each with a different 14-nt ACO sequence containing either 5, 6, 7, 8, 9, or 10 total cytosine nucleotides, respectively RD-12556 and RD-12559 served as duplex control and ODV control, respectively. FIG. 44 shows the Sod) mRNA levels in PMH cells after free uptake treatments of ODV-siRNAs at 0.1 μM and 1 μM for 3 days. Mock was treated in absence of oligonucleotide and not shown. Sod) mRNA levels were quantified by RT-qPCR using gene specific primer sets. Tbp and Hprt1 were amplified as internal reference. The value (y-axis) shows the mean expression values of Sod1 mRNA relative to Mock treatment after normalizing to Tbp and Hprt1 reference levels at both treatment concentrations.

[0167] FIG. 45 shows the effect of Guanine rich used in ODV-siRNAs, as indicated in group (H) of FIG. 37, on in vitro knockdown activity in PMH cells. Group H (Guanine rich group) included 5 compounds (i.e., RD-12999, RD-13000, RD-13001, RD-13002, and RD-13003) each with a different 14-nt ACO sequence containing either 5, 6, 7, 8, or 9 total guanine nucleotides, respectively. RD-12556 and RD-12559 served as duplex control and ODV control, respectively. FIG. 45 shows the Sod1 mRNA levels in PMH cells after free uptake treatments of ODV-siRNAs at 0.1 μM and 1 μM for 3 days. Mock was treated in absence of oligonucleotide and not shown. Sod1 mRNA levels were quantified by RT-qPCR using gene specific primer sets. Tbp and Hprt1 were amplified as internal reference. The value (y-axis) shows the mean expression values of Sod. mRNA relative to Mock treatment after normalizing to Tbp and Hprt1 reference levels at both treatment concentrations.

[0168] FIG. 46 shows the effect of Uracil rich used in ODV-siRNAs, as indicated in group (I) of FIG. 37, on in vitro knockdown activity in PMH cells. Group I (Uracil rich group) included 6 compounds (i.e., RD-13004, RD-13005, RD-13006, RD-13007, RD-13008, and RD-13009) each with a different 14-nt ACO sequence containing either 5, 6, 7, 8, 9, or 10 total uracil nucleotides, respectively RD-12556 and RD-12559 served as duplex control and ODV control, respectively. FIG. 46 shows the Sod1 mRNA levels in PMH cells after free uptake treatments of ODV-siRNAs at 0.1 μM and 1 μM for 3 days. Mock was treated in absence of oligonucleotide and not shown. Sod1 mRNA levels were quantified by RT-qPCR using gene specific primer sets. Tbp and Hprt1 were amplified as internal reference. The value (y-axis) shows the mean expression values of Sod1 mRNA relative to Mock treatment after normalizing to Tbp and Hprt1 reference levels at both treatment concentrations.

[0169] FIG. 47 shows the effect of Purine rich used in ODV-siRNAs, as indicated in group (J) of FIG. 37, on in vitro knockdown activity in PMH cells. Group J (Purine rich group) included 8 compounds each with a different 14-nt ACO sequence containing 9 purines (i.e., RD-13010, RD-13011, and RD-13012), 10 purines (i.e, RD-13013, RD-13014, and RD-13015), or 11 purines (i.e., RD-13016 and RD-13017) comprised of different amounts of adenosine and guanine. RD-12556 and RD-12559 served as duplex control and ODV control, respectively. FIG. 47 shows the Sod1 mRNA levels in PMH cells after free uptake treatments of ODV-siRNAs at 0.1 μM and 1 μM for 3 days. Mock was treated in absence of oligonucleotide and not shown. Sod1 mRNA levels were quantified by RT-qPCR using gene specific primer sets. Tbp and Hprt1 were amplified as internal reference. The value (y-axis) shows the mean expression values of Sod1 mRNA relative to Mock treatment after normalizing to Tbp and Hprt1 reference levels at both treatment concentrations.

[0170] FIG. 48 shows the effect of Pyrimidine rich used in ODV-siRNAs, as indicated in group (K) of FIG. 37, on in vitro knockdown activity in PMH cells. Group K (Pyrimidine rich group) included 8 compounds each with a different 14-nt ACO sequence containing 9 pyrimidines (i.e., RD-13018, RD-13019, and RD-13020), 10 pyrimidines (i.e., RD-13021 and RD-13022), 11 pyrimidines (i.e., RD-13023 and RD-13024), or 12 pyrimidines (i.e., RD-13025) comprised of different amounts of cytosine and uracil. FIG. 48 shows the Sod1 mRNA levels in PMH cells after free uptake treatments of ODV-siRNAs at 0.1 μM and 1 μM for 3 days. Mock was treated in absence of oligonucleotide and not shown. Sod1 mRNA levels were quantified by RT-qPCR using gene specific primer sets. Tbp and Hprt1 were amplified as internal reference. The value (y-axis) shows the mean expression values of Sod1 m RNA relative to Mock treatment after normalizing to Tbp and Hprt1 reference levels at both treatment concentrations.

[0171] FIG. 49 shows the effect of Balanced pur:pyr used in ODV-siRNAs, as indicated in group (L) of FIG. 37, on in vitro knockdown activity in PMH cells. Group L (Balanced pur:pyr group) included 6 compounds (i.e., RD-13026, RD-13027, RD-13028, RD-13029, RD-13030, and RD-13031) each with a different 14-nt ACO sequence containing a fixed 1:1 ratio of purines to pyrimidines, respectively FIG. 49 shows the Sod1 mRNA levels in PMH cells after free uptake treatments of ODV-siRNAs at 0.1 μM and 1 μM for 3 days. Mock was treated in absence of oligonucleotide and not shown. Sod) mRNA levels were quantified by RT-qPCR using gene specific primer sets. Tbp and Hprt1 were amplified as internal reference. The value (y-axis) shows the mean expression values of Sod1 mRNA relative to Mock treatment after normalizing to Tbp and Hprt1 reference levels at both treatment concentrations.

[0172] FIG. 50A-50C show the in vivo potency of ODV-siRNAs on knocking down Sod1 mRNA levels in lung tissue via intratracheal instillation (ITI) administration in adult C57BL/6J mice. The indicated oligonucleotides (i.e., RD-12401, RD-12402, RD-12403, RD-12557, RD-12929 and RD-12559) were administered via ITI at 0.6 m dose in FIG. 50A. The indicated oligonucleotides (RD-12556, RD-12929 and RD-12559) were administered via ITI at 0.1 mg (FIG. 50B) and 0.6 mg (FIG. 50C) dose. Saline was administrated as a non-treated negative control RD-12404 was a non-specific duplex used as negative control. Mice were sacrificed on day 7 and day 21 post-dosing and Sod1 mRNA knockdown was quantified in lung tissue via RT-qPCR using gene specific primer sets after RNA isolation and RT reaction. Tbp was amplified as an internal reference. Mean Sod1 mRNA levels in lung tissue of 2-7 animals (n=2-7) are shown relative to mRNA levels in non-treated group after normalizing to Tbp.

[0173] FIG. 51A-51B show the in vivo potency of ODV-siRNA on knocking down SOD1 mRNA levels in muscle tissue via intravenous (IV) and subcutaneous (SC) injection in adult SOD1^{G93A} mice. The indicated siRNA RD-12293 was administered via IV and SC injection at 20 mg/kg and 50 mg/kg, respectively. Saline was injected as a non-treated negative control. Mice were sacrificed at day 14 post-dosing and SOD1 mRNA levels were quantified in muscle and liver tissues via RT-qPCR using gene specific primer sets after RNA isolation and RT reaction. Tbp was amplified as an internal reference. Mean SOD1 mRNA levels in muscle tissue of 2˜4 animals (n=2˜4) are shown relative to mRNA levels in non-treated group after normalizing to Tbp.

[0174] FIG. 52 shows in vivo potency of different ODV-siRNA leads on knocking down Sod) mRNA expression via IV injection in adult C57BL/6J mice. The indicated ODV-siRNAs (i.e., RD-12559, RD-12556, RD-12967, RD-13180, RD-12941, RD-12942, RD-12952, RD-12982, RD-12983, RD-12979, RD-13015, RD-13006 and RD-12998) were administered via IV injection at 20 mg/kg. Saline was injected as a non-treated negative control. RD-12556 served as non-ODV duplex control. Mice were sacrificed at day 7 following treatment and Sod1 mRNA levels were quantified in different types of muscle tissue (i.e., Forelimb, Hindlimb, Nape and Gluteus) via RT-qPCR using gene specific primer sets after RNA isolation and RT reaction. Tbp was amplified as an internal reference for RNA loading. Mean Sod1 mRNA levels in muscle tissue of 3˜6 animals (n=3˜6) are shown relative to mRNA levels in non-treated group after normalizing to Tbp.

[0175] FIG. 53A-53C show in vivo potency of different ODV-siRNA leads on knocking down Sod) mRNA expression via ICV injection in adult C57BL/6J mice. The indicated siRNAs or ODV-siRNAs (i.e., RD-12559, RD-12556, RD-13334, RD-12967, RD-13180, RD-12941, RD-12942, RD-12952, RD-12982, RD-12983, RD-12979, RD-13015, RD-13006 and RD-12998) were administered via unilateral ICV injection. Saline was injected as a non-treated negative control. RD-12556 and RD-13334 served as non-ODV duplex control. FIG. 53A shows the Sod) mRNA transcript level in brain-frontal cortex, rest of brain (other than frontal cortex and cerebellum) and brain-cerebellum tissues at 0.2 mg. FIG. 53B shows the Sod1 mRNA transcript level in spinal cord-cervical, spinal cord-thoracic and spinal cord-lumbar tissues at 0.2 mg. FIG. 53C shows the Sod) mRNA transcript level in liver tissue at 0.2 mg. Mice were sacrificed at day 7 following treatment and Sod1 mRNA knockdown was quantified in CNS (i.e., brain-frontal cortex, rest of brain, brain-cerebellum, spinal cord-cervical, spinal cord-thoracic and spinal cord-lumbar) and select peripheral tissues (i.e., liver) via RT-qPCR using gene specific primer sets after RNA isolation and RT reaction. Tbp was amplified as an internal reference. Mean Sod) mRNA levels from 3˜6 animals (n=3˜6) are shown in each of the indicated tissues relative to mRNA levels in non-treated group after normalizing to Tbp.

[0176] FIG. 54A-54B show in vivo potency of different ODV-siRNA leads on knocking down Sod) mRNA expression via IV injection in adult C57BL/6J mice. The indicated siRNAs or ODV-siRNAs (i.e., RD-12559, RD-12556, RD-13334, RD-12967, RD-13180, RD-12941, RD-12942, RD-12952, RD-12982, RD-12983, RD-12979, RD-13015, RD-13006 and RD-12998) were administered via IV injection at 20 mg/kg. Saline was injected as a non-treated negative control RD-12556 and RD-13334 served as non-ODV duplex control FIG. 54A shows the Sod1 mRNA transcript level in heart, liver and spleen tissues at 20 mg/kg FIG. 54B shows the Sod1 mRNA transcript level in lung, kidney and bladder tissues at 20 mg/kg. Mice were sacrificed on day 7 following treatment and Sod1 mRNA knockdown was quantified in select peripheral tissues (i.e., heart, liver, spleen, lung, kidney and bladder) via RT-qPCR using gene specific primer sets after RNA isolation and RT reaction. Tbp was amplified as an internal reference. Mean Sod1 mRNA levels from 2˜6 animals (n=2˜6) are shown in each of the indicated tissues relative to mRNA levels in non-treated group after normalizing to Tbp.

[0177] FIG. 55A-55D show dose-dependent characterization for internal conjugated ODV (iODV)-siRNA in PMH cells. The indicated siRNAs or ODV-siRNAs (i.e., RD-12559, RD-12556 and RD-13351) were transfected into PMH cells using RNAiMAX in dose escalated concentrations representing approximate multiples of IC₅₀ values (FIG. 55A and FIG. 55B). The indicated siRNAs (i.e., RD-12559, RD-13180 and RD-13351) were added into PMH cell culture medium in dose escalated concentrations representing approximate multiples of IC₅₀ values (FIG. 55C and FIG. 55D). RD-12556 served as non-ODV duplex control. RD-12559 served as ODV-siRNA positive control. Mock treatments were transfected in absence of oligonucleotide (not shown). FIG. 55A and FIG. 55C show Sod1 mRNA levels and FIG. 55B and FIG. 55D show cell viability quantified for each oligonucleotide at every dose by RT-qPCR and CCK8 assay respectively.

[0178] FIG. 56 interprets some of the in vivo data of siSOD1 with ACO variants in Example 28. The mean average knockdown data (Mean % Reduction) in CNS tissues (brain and spinal cord, compared to liver) are listed in the table. ODV-siSOD1 variants that had possible better and worse retention with regards to local and periphery tissues knockdown activity are exemplified.

[0179] FIG. 57 shows the design of ACO sequence variants derived from the exemplary AC1. The variants include 15 sequences in which the siRNA, linker (L9), 2′MOE modification and PS backbone are fixed, but ACO sequence and length are modified relative to the AC1 sequence. The palindromes, deletions, purine/pyrimidine switches which may impact the delivery efficiency are exemplified.

### DETAILED DESCRIPTION

[0180] While various embodiments of the invention have been shown and described herein, it will be obvious to those skilled in the art that such embodiments are provided by way of example only. Numerous variations, changes, and substitutions may occur to those skilled in the art without departing from the invention. It should be understood that various alternatives to the embodiments of the invention described herein may be employed.

[0181] Before the present invention described, it is to be understood that this invention is not limited to particular embodiments described, as such may, of course, vary. It is also to be understood that the terminology used herein is for the purpose of describing particular embodiments only, and is not intended to be limiting, since the scope of the present invention will be limited only by the appended claims.

[0182] Where a range of values is provided, it is understood that each intervening value, to the tenth of the unit of the lower limit unless the context clearly dictates otherwise, between the upper and lower limits of that range is also specifically disclosed. Each smaller range between any stated value or intervening value in a stated range and any other stated or intervening value in that stated range is encompassed within the invention. The upper and lower limits of these smaller ranges may independently be included or excluded in the range, and each range where either, neither or both limits are included in the smaller ranges is also encompassed within the invention, subject to any specifically excluded limit in the stated range. Where the stated range includes one or both of the limits, ranges excluding either or both of those included limits are also included in the invention.

[0183] Unless defined otherwise, all technical and scientific terms used herein have the same meaning as commonly understood by one of ordinary skill in the art to which this invention belongs. Although any methods and materials similar or equivalent to those described herein can be used in the practice or testing of the present invention, the exemplary methods and materials are now described. All publications mentioned herein are incorporated herein by reference to disclose and describe the methods and/or materials in connection with which the publications are cited. It is understood that the present disclosure supersedes any disclosure of an incorporated publication to the extent there is a contradiction.

[0184] It must be noted that as used herein and in the appended claims, the singular forms “a”, “an”, and “the” include plural referents unless the context clearly dictates otherwise. Thus, for example, reference to “a sample” includes a plurality of such samples and reference to “the molecule” includes reference to one or more molecules and equivalents thereof known to those skilled in the art, and so forth.

[0185] The publications discussed herein are provided solely for their disclosure prior to the filing date of the present application. Nothing herein is to be construed as an admission that the present invention is not entitled to antedate such publication by virtue of prior invention.

[0186] Further, the dates of publication provided may be different from the actual publication dates which may need to be independently confirmed.

### Definitions

[0187] The terms “Amyotrophic lateral sclerosis” or “ALS” include, but are not limited to, familial ALS (fALS), sporadic ALS (sALS), Lou Gehrig's disease, diseases associated with mutant genes Chromosome 9 Open Reading Frame 72 gene (C9orf72; 40%), superoxide dismutase 1 (SOD1; 20%), transactive response DNA-binding protein 43 (TDP43; 4%) and fused in sarcoma/translocated in liposarcoma (FUS/TLS; 4%).

[0188] The term “oligonucleotide agent” or “oligonucleotide” can be used interchangeably, and refers to polymers of nucleotides, and includes, but is not limited to, single-stranded or double-stranded nucleic acid molecules of DNA, RNA, or DNA/RNA hybrid, oligonucleotide strands containing regularly and irregularly alternating deoxyribosyl portions and ribosyl portions, as well as modified and naturally or unnaturally existing frameworks for such oligonucleotides. Specifically, the oligonucleotide agent for inhibiting mRNA transcript level of target gene described herein is a small inhibiting nucleic acid molecule (siRNA), an antisense oligonucleotide molecule (ASO), or an oligonucleotide delivery vehicle (ODV) conjugated siRNA molecule (siRNA-ACO). Also specifically, the oligonucleotide agent for activating transcription of target gene described herein is a small activating nucleic acid molecule (saRNA), or an oligonucleotide delivery vehicle (ODV) conjugated saRNA molecule (saRNA-ACO).

[0189] As used herein, the terms “subject” and “individual” are used interchangeably herein to mean any living organism that may be treated with agents of the present application. The term “patient” means a human subject or individual, including disclosure infants, children and adults.

[0190] A “therapeutically effective amount” of a composition is an amount sufficient to achieve a desired therapeutic effect, and therefore does not require cure or complete remission. In embodiments of the present application, therapeutic efficacy is an improvement in any of the disease indicators, and a therapeutically effective amount is sufficient to cause an improvement in a clinically significant condition/symptom in the treated individual. The phrases “therapeutically effective amount” and “effective amount” are used herein to mean an amount sufficient to reduce by at least about 15 percent, preferably by at least 50 percent, more preferably by at least 90 percent, or to increase at least about 50 percent, at least about 100 percent, at least about 200 percent, more preferable at least about 500 percent and most preferably prevent, a clinically significant deficit in the activity, function and response of the individual being treated.

[0191] The effective amount may vary depending on such factors as the size and weight of the subject, the type of illness, or the particular agents of the application. For example, the choice of the agent of the application could affect what constitutes an “effective amount.” One of ordinary skill in the art would be able to study the factors contained herein and make the determination regarding the effective amount of the agents of the application without undue experimentation.

[0192] The regime of administration may affect what constitutes an effective amount. The agent of the application can be administered to the subject either prior to or after the disease diagnosis or condition. Further, several divided dosages, as well as staggered dosages, can be administered daily or sequentially, or the dose can be continuously infused, or can be a bolus injection. Further, the dosages of the agent(s) of the application could be proportionally increased or decreased as indicated by the exigencies of the therapeutic or prophylactic situation.

[0193] The terms “treat.” “treated,” “treating”, or “treatment” as used herein have the meanings commonly understood in the medical arts, and therefore do not require cure or complete remission, and include any beneficial or desired clinical results. Non-limiting examples of such beneficial or desired clinical results are prolonging survival as compared to expected survival without treatment, reduced symptoms including one or more of the followings: weakness and atrophy of proximal skeletal muscles, inability to sit or walk independently, difficulties in swallowing, breathing, etc.

[0194] As used herein, “preventing” or “delaying” a disease refers to inhibiting the full development of a disease.

[0195] The term “biological sample” refers to any tissue, cell, fluid, or other material derived from an organism (e.g., human subject). In certain embodiments, the biological sample is serum or blood.

[0196] As used herein, the term “sequence identity” or “sequence homology” means that one oligonucleotide strand (sense or antisense) of, for example, an saRNA or siRNA has at least 80% similarity with a region on the coding strand or template strand of the promotor, or the sequence of a target gene.

[0197] In embodiments of the present application, one target gene is SOD1 By “target sequence” is meant a sequence fragment to which the sense strand or antisense oligonucleotide of the siRNA or saRNA is homologous or complementary. For example, in certain embodiments, a SOD1 siRNA is homologous or complementary to a target select sequence within human SOD1 transcript.

[0198] As used herein, the term “non-targeting” means that the referenced accessory oligonucleotide (ACO) which conjugates with the targeting oligonucleotide (e.g., siRNA, saRNA, and etc.) does not specifically complement to the target sequence which the targeting oligonucleotide functions, and/or that the referenced oligonucleotide (i.e., ACO) does not share the same target sequence which the targeting oligonucleotide (e.g., siRNA, saRNA, and etc.) specifically attends to function to. The targeting oligonucleotide disclosed herein is a nucleic acid sequence that specifically complements to the target sequence or the region thereof. In some embodiments, the term “non-targeting oligonucleotide” may comprise any referenced oligonucleotide except the “targeting sequence”. In some case, the “specifically complementary” may mean that the complementarity between the targeting oligonucleotide and the target sequence or the region thereof is at least about 95%. The non-targeting oligonucleotide (i.e., accessory oligonucleotide, or “ACO” used interchangeably) is not to elicit biological activity via any known mechanism, nor intended to elicit activities indicative of ASO (i.e., “mixmer” or “gapmer”) function onto a complementary nucleic acid sequence (i.e., mRNA) in a certain subject, an organ of the subject, a tissue of the subject, or a cell of the subject, when the oligonucleotide is administered. The non-targeting oligonucleotide (i.e., ACO) is to facilitate the introduction of the targeting oligonucleotide (e.g., siRNA, saRNA, and etc.) it conjugates into a certain subject, an organ of the subject, a tissue of the subject, a cell of the subject, or a cell nucleus of the subject, when the oligonucleotide conjugate is administered.

[0199] As used herein, the term “gapmer” refers to a short DNA antisense oligonucleotide (ASO) structure with modified RNA segments on both sides of the central DNA structure. In some embodiments, at least one of the modified RNA segments comprises one or more of modified nucleotides selected from locked nucleic acids (LNA), and 2′-OMe or 2′-F modified nucleotides to increase affinity to the target, increase nuclease resistance, reduce immunogenicity, and/or decrease toxicity. In some embodiments, a gapmer comprises at least one nucleotide modified with a phosphorothioate (PS) group. In some embodiments, the gamper is designed to hybridize to a target piece of RNA and silence the gene transcript through the induction of RNase H cleavage. As an example, the ASO drug “Toferson” is a gapmer that knockdowns SOD1 mRNA for treatment of ALS A possible example of a dual-action oligonucleotide (DAO) with a gapmer ASO disclosed in the present application could be “siSOD1-Toferson”.

[0200] As used herein, the term “mixmer” refers to an antisense oligonucleotide (ASO) characterized as a mixture of DNA and chemically modified nucleic acid analogs in structure. Optionally, a mixmer is composed of fully modified nucleotides or nucleic acid analogs. In some embodiments, a mixmer is designed to bind and mask complementary RNA sequence to sterically block proteins, factors, or other RNAs from interacting with targeted RNA. In some embodiments, a mixmers is designed to alter pre-mRNA splicing by displacing the spliceosome. In some embodiments, a mixmer is designed to bind and sequester microRNAs (miRNAs) in which it is adopt yet another name called an “antagomir” or an “anti-miR”.

[0201] As used herein, the terms “sense strand” or “passenger strand” are interchangeable. The sense strand of dsRNA (e.g., siRNA, saRNA) molecule can include, for example, a first nucleic acid strand of siRNA comprising a fragment of the mRNA sequence of a target gene.

[0202] As used herein, the terms “antisense strand” or “guide strand” are interchangeable. The antisense strand of an dsRNA molecule can include, for example, a second nucleic acid strand in a duplex of saRNA or siRNA that is complementary to the sense strand.

[0203] As used herein, the term “first oligonucleotide strand” can be a sense strand or an antisense strand. For example, the sense strand of a saRNA refers to an oligonucleotide strand having homology with the coding strand of the promoter DNA sequence of the target gene of the saRNA. The sense strand of a siRNA refers to an oligonucleotide strand having homology with the mRNA sequence of the target gene of the siRNA. The antisense strand refers to an oligonucleotide strand complementary with the sense strand in the dsRNA.

[0204] As used herein, the term “second oligonucleotide strand” can also be a sense strand or an antisense strand if the first oligonucleotide strand is a sense strand, the second oligonucleotide strand is an antisense strand; and if the first oligonucleotide strand is an antisense strand, the second oligonucleotide strand is a sense strand.

[0205] The term “promoter” as used herein refers to a nucleic acid sequence, which encodes no proteins and plays a regulatory role for the transcription of a protein-coding or RNA-coding nucleic acid sequence by associating with them spatially. Generally, a eukaryotic promoter contains 100 to 5,000 base pairs, although this length range is not intended to limit the term of “promoter” as used herein. Despite that the promoter sequence is generally located at the 5′ terminus of a protein-coding or RNA-coding sequence, it also exists in exon and intron sequences.

[0206] As used herein, the term “coding strand” refers to the DNA strand in the target gene that cannot be transcribed, the nucleotide sequence of which is identical to the sequence of the RNA produced by transcription (in RNA the T in DNA is replaced by U). The coding strand of the double-stranded DNA sequence of the target gene promoter described in the present disclosure refers to the promoter sequence on the same DNA strand as the DNA coding strand of the target gene.

[0207] As used herein, the term “template strand” refers to another strand of double-stranded DNA of a target gene that is complementary to the coding strand and that can be transcribed as a template into RNA that is complementary to the transcribed RNA base (A-U, G-C). During transcription, RNA polymerase binds to the template strand and moves along the 3′→5′ direction of the template strand, catalyzing RNA synthesis in the 5′→3′ direction. The template strand of the double-stranded DNA sequence of the target gene promoter described in the present disclosure refers to the promoter sequence on the same DNA strand as the DNA template strand of the target gene.

[0208] As used herein, the term “transcription start site” or TSS refers to a nucleotide that marks the initiation of transcription on the template strand of a gene. The transcription start site may be present on the template strand of the promoter region. A gene may have more than one transcription start site.

[0209] As used herein, the term “overhang” refers to an oligonucleotide strand end (5′ or 3′) with non-base paired nucleotide(s) resulting from another strand extending beyond one of the strands within the double stranded oligonucleotide. Single stranded regions extending beyond the 3′ and/or 5′ ends of the duplexes are referred to as overhangs. In certain embodiments, the overhang is from 0 to 6 nucleotides in length. It is understood that an overhang of 0 nucleotides means that there is no overhang.

[0210] As used herein, the terms “gene activation”, “activating gene expression”, “gene upregulation” and “upregulating gene expression” can be used interchangeably, and means an increase or upregulation in transcription, translation, expression or activity of a certain nucleic acid sequence as determined by measuring the transcription level, mRNA level, protein level, enzymatic activity, methylation state, chromatin state or configuration, translation level or the activity or state in a cell or biological system of a gene. These activities or states can be determined directly or indirectly. In addition, “gene activation” or “activating gene expression” refers to an increase in activity associated with a nucleic acid sequence, regardless the mechanism of such activation. For example, gene activation occurs at the transcriptional level to increase transcription into RNA and the RNA is translated into a protein, thereby increasing the expression of the protein.

[0211] As used herein, the terms “gene silencing”, “knockdown of gene expression”, “gene downregulation” and “downregulating gene expression” can be used interchangeably, and means a decrease or downregulation in transcription, translation, expression or activity of a certain nucleic acid sequence as determined by measuring the transcription level, mRNA level, protein level, enzymatic activity, methylation state, chromatin state or configuration, translation level or the activity or state in a cell or biological system of a gene. These activities or states can be determined directly or indirectly. In addition, “gene downregulation” or “downregulating gene expression” refers to a decrease in activity associated with a nucleic acid sequence, regardless the mechanism of such downregulation. For example, gene downregulation occurs at the transcriptional level to decrease or silence transcription into RNA and the RNA is not translated into a protein, thereby decreasing or silencing the expression of the protein.

[0212] As used herein, the terms “short interfering RNA”, “siRNA” and “silencing RNA” can be used interchangeably and refer to a ribonucleic acid molecule that can downregulate, knockdown, or silence target gene expression. It can be a double-stranded nucleic acid molecule. It interferes with the expression of specific genes with complementary nucleotide sequences by degrading mRNA after transcription, preventing translation siRNA binds to target mRNA mainly in the cytoplasm to down-regulate gene expression post-transcriptionally via the RNA interference (RNAi) mechanism. siRNAs may be designed to target a gene's mRNA sequence to silence its expression via the RNAi mechanism, such as SOD1, for maximizing treatment outcomes, e.g., for ALS patients. siRNAs are molecules having endogenous RNA bases or chemically modified nucleotides. The modifications do not abolish cellular activity, but rather impart increased stability and/or increased cellular potency Examples of chemical modifications include phosphorothioate groups, 2′-deoxynucleotide, 2′-OCH₃-containing ribonucleotides, 2′-F-ribonucleotides, 2′-methoxyethyl ribonucleotides, combinations thereof and the like. The siRNA can have varying lengths (e.g., 10-200 bps) and structures (e.g., hairpins, single/double strands, bulges, nicks/gaps, mismatches) and are processed in cells to provide active gene silencing. A double-stranded siRNA can have the same number of nucleotides on each strand (blunt ends) or asymmetric ends (overhangs). An overhang of 1-2 nucleotides, for example, can be present on the sense and/or the antisense strand, as well as present on the 5′- and/or the 3′-ends of a given strand. The length of the siRNA molecule is typically about 10 to about 60, about 10 to about 50, about 15 to about 30, about 17 to about 29, about 18 to about 28, about 19 to about 27, about 20 to about 26, about 21 to about 25, and about 22 to about 24 base pairs, and typically about 15, about 16, about 17, about 18, about 19, about 20, about 21, about 23, about 25, about 30, about 40, or about 50 base pairs. In addition, the terms “small interfering RNA”, “silencing RNA” and “siRNA” also contain nucleic acids other than the ribonucleotide, including, but not limited to, modified nucleotides or analogues.

[0213] As used herein, the terms “inhibition of gene expression” or “inhibiting gene expression” and “gene downregulation” or “down-regulating gene expression” can be used interchangeably, and mean an decrease in transcription, translation, expression or activity of a certain nucleic acid as determined by measuring the transcriptional level, mRNA level, protein level, enzymatic activity, methylation state, chromatin state or configuration, translation level or the activity or state in a cell or biological system of a gene. These activities or states can be determined directly or indirectly. In addition, “inhibition of gene expression”. “inhibiting gene expression”, “gene down-regulation” or “down-regulating gene expression” refers to a decrease in activity associated with a nucleic acid sequence, regardless of the mechanism of such activation. For example, inhibition of gene expression occurs at the transcriptional level to decrease transcription into RNA and the RNA is translated into a protein, thereby decreasing the expression of the protein.

[0214] As used herein, the terms “small activating RNA”, “saRNA” and “small activating ribonucleic acid” can be used interchangeably and refer to a ribonucleic acid molecule that can upregulate target gene expression. It can be a double-stranded nucleic acid molecule composed of a first nucleic acid strand containing a ribonucleotide sequence with sequence homology with the non-coding nucleic acid sequence (such as a promoter and an enhancer) of a target gene and a second nucleic acid strand containing a nucleotide sequence complementary with the first strand. The saRNA can also be comprised of a synthesized or vector-expressed single-stranded RNA molecule that prone to form a hairpin structure by two complementary regions within the molecule, wherein the first region contains a ribonucleotide sequence having sequence homology with the target sequence of a promoter of a gene, and a ribonucleotide sequence contained in the second region is complementary with the first region. The length of the duplex region of the saRNA molecule is typically about 10 to about 60, about 10 to about 50, about 10 to about 40, about 12 to about 30, about 14 to about 28, about 16 to about 26, about 18 to about 24, and about 20 to about 22 base pairs, and typically about 10, about 13, about 15, about 17, about 18, about 19, about 20, about 21, about 22, about 25, about 30, about 40, about 50, or about 60 base pairs. In addition, the terms “small activating RNA”, “saRNA” and “small activating ribonucleic acid” also contain nucleic acids other than the ribonucleotide, including, but not limited to, modified nucleotides or analogues.

[0215] As used herein, the term “ASO” and “antisense oligonucleotide” can be used interchangeably and refer to single-stranded oligonucleotides which binds to complementary mRNA to elicit RNase H-dependent knockdown or the mRNA or alter protein binding of the mRNA via steric hindrance.

[0216] As used herein, the term “hotspot” of siRNAs or ASOs refers to a nucleic acid region of at least 12 bp in length where functional siRNAs/ASOs are enriched, i.e., at least 80%, e.g., about 85%, about 90%, about 95% or about 100% of the siRNAs/ASOs designed to target this region is functional and potent of inhibiting in the mRNA transcript level of the target gene. A “hotspot” herein is defined by a nucleic acid region on the target sequence of the siRNAs/ASOs, where the 5′-ends of the functional siRNAs or ASOs are located. In a non-limiting example, a siRNA/ASO is designed according to the following criteria: (1) having a GC content between 35% and 70%, (2) with less than 5 consecutive identical nucleotides, (3) with 3 or less dinucleotide repeats; and (4) with 3 or less trinucleotide repeats. In a non-limiting example, each of the hotspot sequences disclosed herein comprises at least 4, at least 5, or at least 6 (5′-ends of) functional siRNAs or ASOs.

[0217] As used herein, the term “functional siRNA” refers to a siRNA, at a 1 nM treatment concentration free uptake by a cell, inhibiting the mRNA transcript level of its intended target gene by at least 80%, as compared to a baseline level of SOD1 mRNA. The term “non-functional siRNA” refers to a siRNA, at a 1 nM treatment concentration free uptake by a cell, not capable of inhibiting the mRNA transcript level by 80%, as compared to a baseline level of SOD1 mRNA.

[0218] As used herein, the term “functional ASO” refers to an ASO, at a 200 nM treatment concentration free uptake by a cell, inhibiting the mRNA transcript level of its intended target gene by at least 60%, as compared to a baseline level of SOD1 mRNA. The term “non-functional siRNA” refers to an ASO, at a 200 nM treatment concentration free uptake by a cell, not capable of inhibiting the mRNA transcript level by 60%, as compared to a baseline level of SOD1 mRNA.

[0219] As used herein, the term “isolated target site”, “target site” and “isolated polynucleotide” can be used interchangeably, and herein means a nucleic acid target site to which a siRNA has complementarity or hybridizes to. For example, an isolated nucleic acid sequence of a target site can include a nucleic acid sequence to which a region of siRNAs has complementarity or hybridize to.

[0220] As used herein, the term “complementary” refers to the capability of forming base pairs between two oligonucleotide strands. The base pairs are generally formed through hydrogen bonds between nucleotides in the antiparallel oligonucleotide strands. The bases of the complementary oligonucleotide strands can be paired in the Watson-Crick manner (such as A to T, A to U, and C to G) or in any other manner allowing the formation of a duplex (such as Hoogsteen or reverse Hoogsteen base pairing).

[0221] Complementarity includes complete complementarity and incomplete complementarity. “Complete complementarity” or “100% complementarity” means that each nucleotide from the first oligonucleotide strand can form a hydrogen bond with a nucleotide at a corresponding position in the second oligonucleotide strand in the double-stranded region of the siRNA molecule, with no base pair being “mispaired”. “Incomplete complementarity”, “partial complementarity”, or “mismatch” means that not all the nucleotide units of the two strands are bound with each other by hydrogen bonds. For example, for two oligonucleotide strands each of 20 nucleotides in length in the double-stranded region, if only two base pairs in this double-stranded region can be formed through hydrogen bonds, the oligonucleotide strands have a complementarity of 10%. In the same example, if 18 base pairs in this double-stranded region can be formed through hydrogen bonds, the oligonucleotide strands have a complementarity of 90%. Substantial complementarity refers to at least about 75%, about 79%, about 80%, about 85%, about 90%, about 95% or 99% complementarity.

[0222] As used herein, “3′ untranslated region” and “3′ UTR” can be used interchangeably, referring to a fragment in 3′ region of a messenger RNA (mRNA) to regulate mRNA-based processes, such as mRNA localization, mRNA stability, and translation. In addition, 3′ UTR may establish 3′ UTR-mediated protein-protein interactions (PPIs), and thus can transmit genetic information encoded in 3′ UTR to protein.

[0223] As used herein, “ODV” and “oligonucleotide delivery vehicle” are used interchangeably, which refer to an oligonucleotide molecule comprising a duplex or double-stranded RNA (e.g., siRNA or saRNA) and an ACO which is covalently linked to the duplex RNA via a linker as described in more detail below.

[0224] As used herein, “covalent linker”, “linker” and “linking component” are used interchangeably, which refer to a molecule for covalently joining two molecules, e.g., a single-stranded oligonucleotide (e.g. ACO) and a dsRNA (e.g. siRNA or saRNA), two dsRNAs, etc. As described in more detail below, the term can include, e.g., a nucleic acid linker, a peptide linker, and the like and also, includes disulfide linkers.

[0225] As used herein, the term “synthetic” refers to the manner in which oligonucleotides are synthesized, including any means capable of synthesizing or chemically modifying RNA, such as chemical synthesis, in vitro transcription, vector expression, and the like.

[0226] As used herein, the term “LNA” refers to a locked nucleic acid in which the 2′-oxygen and 4′-carbon atoms are joined by an extra bridge. As used herein, the term “BNA” refers to a 2′-O and 4′-aminoethylene bridged nucleic acid that can contain a five-membered or six-membered bridged structure with an N—O linkage. As used herein, the term “PNA” refers to a nucleic acid mimic with a pseudopeptide backbone composed of N-(2-aminoethyl) glycine units with the nucleobases attached to the glycine nitrogen via carbonyl methylene linkers.

[0227] As used herein, the upper cased “SOD1” or “SOD1 gene” refers to a gene.

[0228] As used herein, the term “SOD1 mRNA” refers to a message RNA (mRNA) generated from the expression of SOD1 gene, or the transcription of SOD1 gene.

[0229] As used herein, the terms “SOD1 protein” refers to a protein generated from the expression of SOD1 gene, or translation of the SOD1 mRNA.

[0230] Unless otherwise defined, all the technological and scientific terms used therein have the same meanings as those generally understood by those of ordinary skill in the art covering the present application.

### Overview

[0231] Aspects of the present application include an oligonucleotide agent comprising oligonucleotide-based delivery vehicle (ODV) to provide improvements in efficient targeting one or more genes associated with a disease or condition, and improvements in the delivery, chemistry, biodistribution, bioavailability, and other pharmacological properties without compromising oligonucleotide activity.

[0232] The present application is based on investigations related to compositions and methods that, a targeting oligonucleotide (siRNA, saRNA, etc.), in combination with an ACO, can activate/upregulate a gene expression and increase the amount of expression of full-length gene or protein, or knockout/silence a gene expression and decrease the amount of expression of full-length gene or protein, in order to improve therapeutic effects for genetic conditions.

[0233] The term “oligonucleotide-delivery vehicle (ODV)” refers to a structure by conjugating an “accessory oligonucleotide (ACO)” to a chemical entity or moiety, e.g., a duplex oligonucleotide, to facilitate the introduction of the molecule into or uptake by a cell, a tissue, or an organ of an individual.

[0234] The present inventors found that the ODV did not interfere with siRNA knockdown activity (Example 3) and saRNA-induced gene activation (Example 5). The present inventors also found that the length, nucleotide compositions, modifications (e.g., 2′-Ome), linking components, palindromes of the sequence, numbers of phosphorothioate (PS) backbone substitution of the ACO had effects on dsRNA activity in vivo. When administered in either brain or spinal cord tissue as compared to a dsRNA without an ODV, ODV-dsRNA shows an improved in vivo activity in the CNS via local injection.

[0235] Additional aspects of the present application include methods of treating Amyotrophic lateral sclerosis (ALS) by administering an effective amount of an oligonucleotide agent comprising a SOD1-targeting siRNA. The siRNA inhibits the expression of SOD1 gene through the RNAi silencing mechanism. The present inventors have developed SOD1 siRNAs with potent inhibitory effect, for use in the treatment of ALS.

[0236] Amyotrophic lateral sclerosis (ALS), also referred to as Lou Gehrig's disease, is an adult-onset, lethal, paralytic disorder caused by the degeneration of motor neurons. ALS is characterized by progressive, adult-onset degeneration of cranial, brainstem and spinal motor neurons, leading to death by respiratory failure within 3-5 years of diagnosis. ALS presents as a familial or a sporadic form, depending on whether or not there is a family history of the disease, with sporadic ALS (sALS) accounts for 90% of the ALS patients. The most common mutant genes account for ˜75% of ALS in the United States: Chromosome 9 Open Reading Frame 72 gene (C9orf72; 40%), superoxide dismutase 1 (SOD1; 20%), transactive response DNA-binding protein 43 (TDP43; 4%) and fused in sarcoma/translocated in liposarcoma (FUS/TLS; 4%). Mutations in the C9orf72 and SOD1 genes also account for ˜5-8% and ˜2-3% of apparently sALS, respectively. To date, most of the studies of gene silencing have been undertaken in the context of the SOD1 gene models; the high copy number SOD1^{G93A} transgenic mouse model is still a cornerstone of ALS research.

[0237] Up to now, only two disease-modifying agents, Riluzole and Edaravone, are approved by U.S. Food and Drug Administration (FDA) for ALS treatment. Riluzole inhibits glutamate release from presynaptic terminals and blocks the post-synaptic N-methyl-D-aspartate (NMDA) receptors, which have been shown to increase survival by three to six months on average. Edaravone is a free radical scavenger that lowers the neuronal damage, eliminating the lipid peroxide hydroxyl radicals and transfers the electrons to edaravone (the radical) to ameliorate the oxidative damage. The two drugs only modestly improve survival and disease progression and can't cure the ALS. To date, there is currently no effective therapy available for ALS and new therapies are needed to treat this disease.

[0238] Among the known genes underlining ALS, SOD1 gene still remains a major cause of fALS and has been considered to be an important ALS drug target. The human SOD1 gene is located on chromosome 21q22.11 and located from base pair 33,031,935 to base pair 33,041,241 with a genomic size of 9307 bp. SOD1 gene codes for the monomeric SOD1 protein (153 amino acids, molecular weight 16 kDa), and also encodes for the detoxifying copper/zinc binding SOD1 enzyme, which has been found to be localized mainly in the cytosol, as well as in the nucleus, peroxisomes, and mitochondria (Tafuri et al. 2015). The first description of the ALS disease dates back to at least 1824 by Charles Bell, however, SOD1 as the first risk gene of ALS was discovered in 1993. When the first SOD1 transgenic mouse model (SOD1^{G93A}) was established in 1994, indicating that the research on ALS entered a new era. All these lines of evidence indicate that SOD1 mutants cause disease most probably via a gain-of-function, and reducing its levels may be beneficial. The excessive oxidation of wild-type SOD1 induces toxic conformational changes SOD1 silencing significantly attenuated astrocyte-mediated toxicity towards motor neurons. Therefore, silencing SOD1 expression is an important strategy for the treatment of ALS.

### Oligonucleotide Agents

[0239] Aspects of the present application include an oligonucleotide agent that includes a single-stranded oligonucleotide (e.g., ACO) having at least 6 nucleotides in length and a targeting double-strand oligonucleotide that are covalently linked, wherein the single-stranded oligonucleotide is a non-targeting oligonucleotide.

[0240] Aspects of the present application include an oligonucleotide agent that includes a single-stranded oligonucleotide (e.g., ACO) having at least 6 nucleotides in length and a targeting double-strand oligonucleotide that are covalently linked, wherein at least one phosphodiester bond between two adjacent nucleotides in the single-stranded oligonucleotide sequence is substituted by a phosphorothioate (PS), mesyl phosphoramidate or boranophosphate bond.

[0241] Aspects of the present application include an oligonucleotide agent that includes a single-stranded oligonucleotide having at least 6 nucleotides in length and a targeting double-strand oligonucleotide that are covalently linked, wherein the single stranded-oligonucleotide comprises a palindrome sequence.

[0242] Aspects of the present application include an oligonucleotide agent that includes a single-stranded oligonucleotide having at least 6 nucleotides in length and a targeting double-strand oligonucleotide that are covalently linked, wherein at least about 14%, at least about 28%, at least about 42%, at least about 57%, at least about 71%, at least about 85%, at least about 92%, or about 100% of the nucleotides of the single-stranded oligonucleotide have a 2′-Ome modification.

[0243] Aspects of the present application include an oligonucleotide agent that includes a single-stranded oligonucleotide having at least 6 nucleotides in length and a targeting double-strand oligonucleotide that are covalently linked, wherein the single-stranded oligonucleotide comprises no more than 72% or no more than 64% of cytosines.

[0244] Aspects of the present application include an oligonucleotide agent that includes a single-stranded oligonucleotide having 6-22 nucleotides in length and a targeting double-strand oligonucleotide that are covalently linked, wherein the single-stranded oligonucleotide is capable of facilitating delivery of the double-stranded oligonucleotide in the central nervous system (CNS).

[0245] In some embodiments, the oligonucleotide agent comprises a double-stranded oligonucleotide, wherein the double-stranded oligonucleotide comprises a sense strand and an antisense strand, wherein the antisense strand has complementarity to a target nucleic acid; and a non-targeting single-stranded oligonucleotide, wherein the single-stranded oligonucleotide is 6-22 nucleotides in length. The double stranded oligonucleotide and the single-stranded oligonucleotide are covalently linked, with or without one or more linking components, to form the oligonucleotide agent.

[0246] In some embodiments, the sense strand of the double stranded targeting oligonucleotide is covalently linked to a non-targeting single-stranded oligonucleotide (NTO). In some embodiments, the antisense strand of the double stranded targeting oligonucleotide is covalently linked to the non-targeting single-stranded oligonucleotide. In certain embodiments, the NTO does not have complementarity to the target nucleic acid of the double stranded oligonucleotide. In certain embodiments, the NTO does not have complementarity to the target gene or target mRNA transcript of the double stranded oligonucleotide. In certain embodiments, the NTO does not have complementarity to a nucleic acid of a subject possessing the target nucleic acid. In some embodiments, the target nucleic acid is a mammalian nucleic acid, e.g., from human.

[0247] In some embodiments, the oligonucleotide agent has a compound formula of:

O₁-L-O₂ (Formula Ia) or

O₂-L-O₂ (Formula Ib), wherein:

[0248] O₁ is a double-stranded oligonucleotide comprising a sense strand and an antisense strand, wherein the antisense strand has complementarity to a target nucleic acid (e.g., mammalian target nucleic acid); O₂ is a non-targeting single-stranded oligonucleotide in some embodiments, the single-stranded oligonucleotide is at least 6 nucleotides in length. L is a linker for covalently linking the double stranded oligonucleotide and the single-stranded oligonucleotide.

[0249] In some embodiments, the oligonucleotide agent has a compound formula of.

[chemical structure]

wherein

[0250] O₁ is a double stranded oligonucleotide comprising a sense strand and an antisense strand, wherein the antisense strand has complementarity to a target nucleic acid; O₂ is a non-targeting single-stranded oligonucleotide. In some embodiments, the single-stranded oligonucleotide is 6-22 nucleotides in length; L is a linker for covalently linking the double stranded oligonucleotide and the single-stranded oligonucleotide; and optional components Cx, Cy, and Cz, wherein Cx, Cy, and Cz are independently absence, or conjugation groups selected from one or more of a lipid, a fatty acid, a fluorophore, a ligand, a saccharide, a peptide, an antibody and any other commonly used conjugation groups. In some embodiments, the compound of Formula II comprises 1 conjugation group. In some embodiments, the compound of Formula II comprises 2 conjugation groups. In some embodiments, the compound of Formula II comprises 3 conjugation groups.

[0251] In some embodiments, the double-stranded oligonucleotide is a siRNA In some embodiments, the double-stranded oligonucleotide is a saRNA.

[0252] In some embodiments, the 5′ end, the 3′ end, or an internal nucleotide of the single-stranded oligonucleotide is conjugated to a linking component. In some embodiments, the internal nucleotide in the sense or antisense strand of the double-stranded oligonucleotide is substituted by a linking component, wherein the single-stranded oligonucleotide is covalently conjugated with the linking component. In some embodiments, the single-stranded oligonucleotide is covalently conjugated to the sense strand, the antisense strand, or both the sense and antisense strands of the second oligonucleotide by a linking component.

[0253] In some embodiments, the single-stranded oligonucleotide is covalently conjugated to the 3′ end, or the 5′ end, or both the 3′ and 5′ ends, or an internal nucleotide of the sense strand of the double-stranded oligonucleotide, as depicted in FIG. 1A, 1B or 1C. In some embodiments, the single-stranded oligonucleotide is covalently conjugated to the 3′ end, or the 5′ end, or both the 3′ and 5′ ends, or an internal nucleotide of the antisense strand of the double-stranded oligonucleotide.

[0254] In some embodiments, the double stranded targeting oligonucleotides and the single-stranded oligonucleotide that are covalently linked have a total nucleotide length ranging from 10 nucleotides to 500 nucleotides (e.g., 10 nucleotides to 100 nucleotides, 50 nucleotides to 100 nucleotides, 50 nucleotides to 200 nucleotides, 20 nucleotides to 100 nucleotides, 20 nucleotides to 200 nucleotides, 20 nucleotides to 300 nucleotides, 50 nucleotides to 300 nucleotides, 20 nucleotides to 80 nucleotides, 100 nucleotides to 300 nucleotides, 300 nucleotides to 500 nucleotides).

### Accessory Oligonucleotides (ACO)

[0255] Although some prior research proved that siRNAs capable of inhibiting SOD1 mRNA and decreasing SOD1 protein expression can be used to treat SOD1 protein-related diseases, e.g., for amyotrophic lateral sclerosis (ALS) patients, the inventors found there are two unsolved issues: 1) a lack of potency of SOD1 siRNA molecules and 2) a lack of efficient delivery method to deliver the siRNA molecule to cells of a target organ or tissue.

[0256] Surprisingly, the current invention found, when the dsRNA agent, e.g. an siRNA, is conjugated to a non-targeting single-stranded accessory oligonucleotide (ACO) as disclosed, bioavailability, biodistribution, and/or cellular uptake and in vivo potency of the dsRNA was significantly improved as compared to an oligonucleotide agent without the ACO. Especially in some in vivo examples in the present application, the ACO of the oligonucleotide agent increased the biodistribution of dsRNA within one, or two, or more target tissues as compared to an oligonucleotide agent without the ACO.

[0257] “Delivering into a cell,” when referring to a targeting double-strand oligonucleotide, e.g., a double-stranded RNA agent (dsRNA) such as a siRNA, a saRNA, or the like, means efficient uptake or absorption by the cell, as is understood by those skilled in the art. Absorption or uptake of an dsRNA can occur through unaided diffusive or active cellular processes, or by auxiliary agents or devices. The meaning of this term is not limited to cells in vitro; an dsRNA can also be “introduced into a cell,” wherein the cell is part of a living organism. In such an instance, introduction into the cell will include the delivery to the organism. For example, for in vivo delivery, dsRNA can be injected into a tissue site or administered systemically. In vitro introduction into a cell includes methods known in the art such as electroporation, free uptake, and lipofection. Further approaches are described herein below which is not known in the art.

[0258] The ACO of the oligonucleotide agent is a single-stranded oligonucleotide that is in favor of the oligonucleotide agent by its delivery properties. Therefore, the ACO does not target a nucleic acid in a subject which the dsRNA is targeting, or a “natural” nucleic acid from the subject, such as a target nucleic acid of the dsRNA. In some embodiments, the ACO) does not target a nucleic acid in a subject which the dsRNA is targeting. In some embodiments, the ACO does not have complementarity with a nucleic acid which the dsRNA is targeting. In some embodiments, the ACO does not have complementarity with a gene sequence or its mRNA transcript which the dsRNA is targeting.

[0259] In some embodiments, the length of the ACO comprises a nucleotide length ranging from 6 to 22 nucleotides, such as 6 nucleotides or more, 7 nucleotides or more, 8 nucleotides or more, 9 nucleotides or more, 10 nucleotides or more, 11 nucleotides or more, 12 nucleotides or more, 13 nucleotides or more, 14 nucleotides or more, 15 nucleotides or more, 16 nucleotides or more, 17 nucleotides or more, 18 nucleotides or more, 19 nucleotides or more, 20 nucleotides or more, 21 nucleotides or more, 22 nucleotides or more. In some embodiments, the length of the ACO is 6 to 18 contiguous oligonucleotides. In some embodiments, the length of the ACO is 10-14 nucleotides in length.

[0260] In some embodiments, the length of the ACO can modulate the activity and/or biodistribution of the oligonucleotide agent within the target tissue or cell of interest. For example, the present inventors found that shorter ACOs demonstrated activity of the oligonucleotide agent throughout the central nervous system, while longer ACOs demonstrated activity of the oligonucleotide agent only in particular regions of the brain, such as the cerebellum. In some embodiments, activity of the oligonucleotide agent throughout the entire central nervous system is desired. In some embodiments, activity of the oligonucleotide agent in particular regions of the brain is desired.

[0261] The ACO may comprise a sequence that is modified in order to further increase the capacity of the oligonucleotide agent to deliver a second oligonucleotide. In some embodiments, the sequence of the ACO comprises one or more of a chemically modified nucleotide, or at least one phosphodiester bond between two adjacent nucleotides in the oligonucleotide sequence is substituted by a phosphorothioate or boranophosphate bond. The chemical modifications of the ACO includes, without limitation, modification of the 2′-OH of the ribose in the nucleotide, the modification or the absence of a base in the nucleotide, the locking or bridging of a nucleic acid, a nucleotide being a peptide nucleic acid, a nucleotide being a deoxyribonucleotide (DNA), a nucleotide having a 5′-phosophate moiety, a nucleotide having a 5′-(E)-vinylphosphonate moiety, a nucleotide having a 5-methyl cytosine moiety, etc. Chemical modifications that may be found in ACOs are also further described below.

[0262] The ACO may comprise at least one phosphodiester bond substituted with phosphorothioate (PS) bond on the backbone of the nucleotide sequence. In some embodiments, the ACO comprises multiple PS backbone modifications, e.g., at least 2 PS, at least 3 PS, at least 4 PS, at least 5 PS, at least 6 PS, or greater than 6 PS backbone modifications. In some embodiments, the ACO comprises at least 10%, at least 20%, at least 30%, at least 40%, at least 50%, at least 60%, at least 70%, at least 80%, at least 90%, at least 95%, or 100% phosphodiester bond substituted with phosphorothioate (PS) bond on the backbone of the nucleotide sequence. As a non-limiting example, a 14 nt ACO may comprise 1, 2, 3, 4, 5, 6, 7, 8, 9, 10, 11, 12, or 13 PS backbone modifications. In some embodiments, the ACO having N nucleotides in length comprises N-1 PS modifications.

[0263] The ACO may also has a specific composition of nucleotides. In some embodiments, the ACO may have a certain percentage of adenines within the nucleotide sequence of the ACO. The ACO may have any percent composition of adenines. Percent compositions of adenines that find use in the present disclosure include without limitation, 30-35%, 35-40%, 40-45%, 45-50%, 50-55%, 55-60%, 60-65%, 65-70%, greater than 70%, etc. In a preferred embodiment, the percent composition of adenines is from about 35% to about 65%.

[0264] In some embodiments, the ACO may have a certain percentage of cytosines within the nucleotide sequence of the ACO. The ACO may have any percent composition of cytosines. Percent compositions of cytosines that find use in the present disclosure include without limitation, 30-35%, 35-40%, 40-45%, 45-50%, 50-55%, 55-60%, 60-65%, 65-70%, 70-75%, 75-80%, greater than 80%, etc. In a preferred embodiment, the percent composition of cytosines is from about 35% to about 72%.

[0265] In some embodiments, the ACO may have a certain percentage of guanosines within the nucleotide sequence of the ACO. The ACO may have any percent composition of guanosines. Percent compositions of guanosines that find use in the present disclosure include without limitation, 30-35%, 35-40%, 40-45%, 45-50%, 50-55%, 55-60%, 60-65%, 65-70%, greater than 70%, etc. In a preferred embodiment, the percent composition of guanosines is from about 35% to about 65%.

[0266] In some embodiments, the ACO may have a certain percentage of uracil within the nucleotide sequence of the ACO. The ACO may have any percent composition of uracil. Percent compositions of uracil that find use in the present disclosure include without limitation, 30-35%, 35-40%, 40-45%, 45-50%, 50-55%, 55-60%, 60-65%, 65-70%, 70-75%, 75-80%, greater than 80%, etc. In a preferred embodiment, the percent composition of uracil is from about 35% to about 72%.

[0267] In some embodiments, the ACO may have a certain percentage of purines within the nucleotide sequence of the ACO. The ACO may have any percent composition of purines. Percent compositions of purines that find use in the present disclosure include without limitation, 35-40%, 40-45%, 45-50%, 50-55%, 55-60%, 60-65%, 65-70%, 70-75%, 75-80%, greater than 80%, etc. In a preferred embodiment, the percent composition of purines is from about 65% to about 72%.

[0268] In some embodiments, the ACO may have a certain percentage of pyrimidines within the nucleotide sequence of the ACO. The ACO may have any percent composition of pyrimidines. Percent compositions of pyrimidines that find use in the present disclosure include without limitation, 35-40%, 40-45%, 45-50%, 50-55%, 55-60%, 60-65%, 65-70%, 70-75%, 75-86%, greater than 80%, etc. In a preferred embodiment, the percent composition of pyrimidines is from about 42% to about 58%.

[0269] In some embodiments, the ACO may have a specific combination of purines and pyrimidines. The specific combination of purines and pyrimidines may be any combination desired. Specific combinations of purines and pyrimidines that find use in the present disclosure include without limitation, about 30% purines about 70% pyrimidines, about 40% purines about 60% pyrimidines, about 50% purines about 50% pyrimidines, about 60% purines about 40% pyrimidines, about 70% purines about 30% pyrimidines, etc. In a preferred embodiment, the specific combination of purines and pyrimidines is about 42% purines and about 58% pyrimidines.

[0270] In some embodiments, the nucleotide sequence of the single-stranded oligonucleotide comprises at least 40%, at least 50%, at least 60%, or at least 70% of the nucleotides have 2′-Ome modification. In some embodiments, 70-100% of the nucleotide in ACO have 2′-Ome modification.

[0271] In some embodiments, the nucleotide sequence of the single-stranded oligonucleotide is a palindrome sequence. The term “palindromic sequence” used herein means a nucleic acid sequence in a double-stranded DNA or RNA molecule whereby reading in a certain direction (e.g., 5′ to 3′) on one strand is identical to the sequence in the same direction (e.g., 5′ to 3′) on the complementary strand. In some embodiments, the single-stranded oligonucleotide with a palindromic sequence enhances activity the double-stranded oligonucleotide or delivery of the oligonucleotide agent. In some embodiments, palindrome ACOs enhanced the protein binding capacity and knockdown activity of ODV-siRNAs on Sod1 mRNA. In some embodiments, the single-stranded oligonucleotide with palindrome sequence is selected from the group of SEQ ID NOs: 1300-1314.

[0272] Therefore, aspects of the present application further relate to an oligonucleotide agent capable of inhibiting the expression of superoxide dismutase 1 (SOD1) comprising a small interfering RNA (siRNA), and an ACO.

[0273] In some embodiments, the oligonucleotide agent comprising one or more conjugated ACOs to enhance the biodistribution of the oligonucleotide agent in particular tissues of the oligonucleotide agent, and increase permeability of the oligonucleotide agent and passage through membranes, such as the blood brain barrier.

[0274] In some embodiments, the ACO is an oligonucleotide comprising a 5′ end and a 3′ end.

[0275] In some embodiments, the dsRNA and the ACO are covalently linked, with or without one or more linking components, to form the oligonucleotide agent.

[0276] In another aspect of the present application, an oligonucleotide agent comprising a siRNA and a non-targeting ACO is provided. The ACO comprises a single-stranded oligonucleotide sequence comprising a nucleotide sequence that is at least 60% homology (e.g., at least 65%, at least 70%, at least 75%, at least 80%, at least 85%, at least 90%, at least 95%, at least 97%, at least 99% homology or 100% identical) to the nucleotide sequence selected from SEQ ID NOs: 953-954. In some embodiments, wherein the ACO comprises a nucleotide sequence that is at least 90% identical to the nucleotide sequence selected from SEQ ID NOs: 953-954.

[0277] In some embodiments, the oligonucleotide agent comprises a single-stranded oligonucleotide (ACO) tethered to a dsRNA. In some embodiments, the dsRNA is a natural nucleic acid. In some embodiments, the natural nucleic acid is a target nucleic acid. In certain embodiments, the natural nucleic acid is an intracellular nucleic acid.

[0278] In some embodiments, the ACO is a non-targeting oligonucleotide (NTO). In some embodiments, the ACO is a synthetic non-targeting oligonucleotide. In some embodiments, the ACO is a random non-targeting oligonucleotide. In some embodiments, the ACO comprises RNA, DNA, BNA, LNA PNA, or combinations thereof.

[0279] In some embodiments, the ACO interacts with one or more of: proteins in the plasma membrane, plasma proteins, peptides, ligands, lipids, fatty acids, saccharides, proteoglycan and zwitterionic phosphocholines. Such interaction of the ACO provides for increased biodistribution and enrichment of the targeting double stranded oligonucleotide of the oligonucleotide agent for local delivery to various target issues and cells of interest. Additionally, such interaction reduces or eliminates cytotoxicity of the oligonucleotide agent, confirming strong ‘on-target’ activity without overt effects on cell viability.

[0280] In certain embodiments, the protein interacting with ACO is selected from one or more of: serum albumin, IgG, Apolipoprotein A-1, Apolipoprotein A-II, Complement factor C3, Transferrin, α-1 Antitrypsin, Haptoglobin, Hemopexin, Fibrinogen, α-2-Macroglobulin, Prealbumin/TTR, Antithrombin III, α-1-Antichymotrypsin, β-2-Glycoprotein, Ceruloplasmin, α-1 Acid glycoprotein, Complement component C1q, Complement factor C4, Histidine-rich glycoprotein, Plasminogen, Fibronectin, ApoB100, Factor H, Apolipoprotein E. and Factor V.

[0281] In yet other embodiments, the protein interacting with ACO is selected from one or more of: ASGPR, EGFR, LDLR, M6PR, TLR, Stabilin, SRB, Nucleolin, AP2M1, EEA1, Rab5C, Rab7a, STX5, P115, COPH, M6PR, GCC2, ANXA2, TCP1, ALIX, TSGI01, VPS28, GLP-1, and HSP-90.

[0282] In certain embodiments, the interaction of the ACO is through direct binding or mediated by one or more conjugated ligands which is covalently linked to the ACO or the double stranded oligonucleotide, or both. In some embodiments, the one or more conjugated ligands comprise a lipid, a fatty acid, a fluorophore, a saccharide, a peptide, an antibody and any other commonly used conjugation ligands.

[0283] In certain embodiments, the conjugating ligands is selected from one or more of a cell-penetrating peptide, polyethylene glycol, an alkaloid, a tryptamine, a benzimidazole, a quinolone, an amino acid, a cholesterol, glucose and N-acetylgalactosamine. In certain embodiments, the one or more conjugation ligands is a fatty acid.

[0284] In some embodiments, the oligonucleotide agent comprising the one or more conjugation ligands enhances the biodistribution of the oligonucleotide agent in particular tissues, reduce or eliminate cytotoxicity of the oligonucleotide agent, and increase permeability of the oligonucleotide agent and passage through membranes, such as the blood brain barrier.

[0285] In some embodiments, the ACO comprises a single-stranded oligonucleotide sequence comprising a nucleotide sequence that is at least 60% (e.g., at least 65%, at least 70%, at least 75%, at least 80%, at least 85%, at least 90%, at least 95%, at least 97%, at least 99% or 100%) identical to the nucleotide sequence selected from SEQ ID NOs: 1-22.

[0286] In some embodiments, the oligonucleotide agent comprises an ACO. In certain embodiments, the ACO comprises a nucleotide sequence that is at least 60% (e.g., at least 65%, at least 70%, at least 75%, at least 80%, at least 85%, at least 90%, at least 95%, at least 97%, at least 99% or 100%) identical to a nucleotide sequence selected from the group of AC2(N22) (SEQ ID NO: 1), AC2(N20) (SEQ ID NO: 2), AC2(N18) (SEQ ID NO: 3), AC2(N16) (SEQ ID NO 4), AC2(N15) (SEQ ID NO: 5), AC2(N14) (SEQ ID NO 6), AC2(N12) (SEQ ID NO. 7) AC2(N12) (SEQ ID NO: 7), AC2(N10) (SEQ ID NO: 8), AC2(N8) (SEQ ID NO: 9), AC2(N6) (SEQ ID NO: 10), AC2(22) (SEQ ID NO: 11), AC2(18) (SEQ ID NO: 12), AC2(16) (SEQ ID NO: 13), AC2(15) (SEQ ID NO: 14), AC2(14) (SEQ ID NO: 15), AC2(13) (SEQ ID NO: 16), AC2(12) (SEQ ID NO: 17), AC2(11) (SEQ ID NO: 18), AC2(10) (SEQ ID NO: 19), AC2(9) (SEQ ID NO: 20), AC2(8) (SEQ ID NO: 21) and AC2(6) (SEQ ID NO: 22).

[0287] In certain embodiments, the ACO comprises a chemically modified nucleotide sequence that is at least 80% (e.g., at least 85%, at least 90%, at least 95%, at least 97%, at least 99% or 100%) identical to a nucleotide sequence selected from the group of SEQ ID NOs: 1299-1379 In certain embodiments, the ACO has a chemically modified nucleotide sequence selected from the group of SEQ ID NOs: 1299-1379. In certain embodiments, the ACO has a chemically modified nucleotide sequence and a linker selected from the group of SEQ ID NOs: 1299-1379. In certain embodiments, the ACO has a chemically modified nucleotide sequence that is with 0, 1, 2 or 3 chemical modification differences to a nucleotide sequence selected from the group of SEQ ID NOs: 1299-1379.

[0288] In some embodiments, the oligonucleotide agent of the present application comprises more than one ACO, for example, 2, 3, 4, 5, 6, 7, 9, 10 ACOs, covalently linked to a dsRNA, with or without one or more linkers in between the ACOs and dsRNA. The amount of ACO, upon need, can vary from 2 to 10, or 2 to 100, or 2 to 1,000, or 2 to 10,000, linked to dsRNA via a multivalent linker, for example, a polymeric linker, in branch or liner form. In some embodiments, multiple ACOs are covalently linked to 2 or more dsRNAs, for example, 2, 3, 4, 5, 6, 7, 9, 10 or more dsRNAs, including saRNAs and/or siRNAs, in one agent.

[0289] In some embodiments, the oligonucleotide agent of the present application comprises one ACO and multiple dsRNAs, for example, 2, 3, 4, 5, 6, 7, 9, 10 dsRNAs, linked with or without one or more linkers in between the ACO and dsRNAs. The amount of dsRNA, including saRNAs and/or siRNAs, upon need, can vary from 2 to 10, or 2 to 100, or 2 to 1,000, or 2 to 10,000, linked to ACO via a multivalent linker, for example, a polymeric linker, in branch or liner form.

### Targeting Oligonucleotide

[0290] In some embodiments, the targeting oligonucleotide comprises a double stranded oligonucleotide. In some embodiments, the double-stranded oligonucleotide is a double-stranded RNA (dsRNA). The dsRNA may be any dsRNA deemed useful. dsRNAs that find use in the present disclosure include, without limitation, siRNA, saRNA, etc.

[0291] In some embodiments, the double-stranded oligonucleotide comprises a sense strand and an antisense strand, the antisense strand having complementarity to a target nucleic acid. In some embodiments, the antisense strand having complementarity to a target nucleic acid is located in a promotor sequence. In some embodiments, the antisense strand having complementarity to a target nucleic acid is located in a coding or template sequence of a gene. In some embodiments, one of the sense or antisense strands has complementarity to a target nucleic acid which is a gene transcript, e.g., a mRNA or a pre-mRNA

[0292] In some embodiments, the dsRNA comprises a sense strand that is at least 17 contiguous nucleotides. In some embodiments, the dsRNA comprises a sense strand that is at least 18 contiguous nucleotides. In some embodiments, the dsRNA comprises a sense strand that is at most 60 contiguous nucleotides.

[0293] In some embodiments, the sense strand has a length ranging from about 10 nucleotides or more, about 15 nucleotides or more, about 20 nucleotides or more, about 25 nucleotides or more, about 30 nucleotides or more, about 35 nucleotides or more, about 40 nucleotides or more, about 45 nucleotides or more, about 50 nucleotides or more, about 55 nucleotides or more, or about 60 nucleotides or more. In some embodiments, the sense strand is 10-100 nucleotides in length (e.g., 10-20 nucleotides, 10-50 nucleotides, 10-90 nucleotides, 20-95 nucleotides, 30-70 nucleotides, 40-80 nucleotides, 50-100 nucleotides, 10-40 nucleotides, 10-30 nucleotides). In some embodiments, the sense strand is 10-60 nucleotides in length (e.g., 10-20 nucleotides, 10-50 nucleotides, 10-40 nucleotides, 10-30 nucleotides) In some embodiments, the sense strand has a nucleotide length ranging from 27-41 nucleotides.

[0294] In some embodiments, the antisense strand has a length ranging from about 10 nucleotides or more, about 15 nucleotides or more, about 20 nucleotides or more, about 25 nucleotides or more, about 30 nucleotides or more, about 35 nucleotides or more, about 40 nucleotides or more, about 45 nucleotides or more, about 50 nucleotides or more, about 55 nucleotides or more, or about 60 nucleotides or more. In some embodiments, the antisense strand is 10-100 nucleotides in length (e.g., 10-20 nucleotides, 10-50 nucleotides, 10-90 nucleotides, 20-95 nucleotides, 30-70 nucleotides, 40-80 nucleotides, 50-100 nucleotides, 10-40 nucleotides, 10-30 nucleotides). In some embodiments, the antisense strand is 19-30 nucleotides in length. In some embodiments, the antisense strand is 18-26 nucleotides in length.

[0295] The double-stranded oligonucleotide may comprise a sequence that is modified in order to further increase the stability and/or the ability of the double-stranded oligonucleotide to modulate gene expression. In some embodiments, the sequence of the double-stranded oligonucleotide comprises one or more of a chemically modified nucleotide, or at least one phosphodiester bond between two adjacent nucleotides in the oligonucleotide sequence is substituted by a phosphorothioate or boranophosphate bond. The chemical modifications of the double-stranded oligonucleotide includes, without limitation, modification of the 2′-OH of the ribose in the nucleotide, the modification or the absence of a base in the nucleotide, the locking or bridging of a nucleic acid, a nucleotide being a peptide nucleic acid, a nucleotide being a deoxyribonucleotide (DNA), a nucleotide having a 5′-phosophate moiety, a nucleotide having a 5′-(E)-vinylphosphonate moiety, a nucleotide having a 5′-methyl cytosine moiety, etc. Chemical modifications that may be found in double-stranded oligonucleotides are also further described below.

Short Interfering RNA (siRNA)

[0296] Embodiments of the present application are based in part on the surprising discovery that an oligonucleotide agent (for example, siRNA, also referred to as “SOD1 gene siRNA”, “SOD1 siRNA”, or “siSOD1” herein) is capable of inhibiting or downregulating the expression of a SOD1 gene in a cell. The decrease in functional SOD1 gene transcript following administration with an oligonucleotide agent of the present application can achieve a significant decrease or downregulation in the levels of SOD1 mRNA and SOD1 protein in a cell or a mammal.

[0297] In particular, the inventors discovered that the functional oligonucleotide agents capable of inhibiting expression of superoxide dismutase 1 (SOD1) comprising a siRNA, wherein the siRNA comprises a sense strand and an antisense strand forming a double strand, wherein the antisense strand comprises a nucleotide sequence comprising at least 10 contiguous nucleotides, with 0, 1, 2 or 3 mismatches, having at least 85% nucleotide sequence complementarity or homology to a portion of the nucleotide sequence of SOD1 mRNA. As a beneficial consequence, a target sequence (e.g., an isolated nucleic acid sequence comprising the target sequence), upon interacting with the siRNA, can inhibit/downregulate the SOD1 mRNA transcript by at least 10% as compared to a baseline level of SOD1 mRNA.

[0298] Based at least in part on these discoveries, the present application features siRNA, compositions, and pharmaceutical compositions for inhibiting/downregulating the SOD) mRNA transcript by at least 10% as compared to baseline levels of SOD1 mRNA. In some embodiments, the siRNA inhibits or downregulates the SOD1 mRNA more than 10%. For instance, the siRNA inhibits or downregulates SOD1 mRNA by at least about 15%, at least about 20%, at least about 25%, at least about 30%, at least about 35%, at least about 40%, at least about 45%, at least about 50%, at least about 55%, at least about 60%, at least about 65%, at least about 70%, at least about 75%, at least about 80%, at least about 85%, at least about 90%, at least about 95%, at least about 100%, or greater than 100% as compared to baseline levels of SOD1 mRNA.

[0299] Also provided herein are methods for preventing or treating a disease or condition induced by over-expression of SOD1 protein, a SOD1 gene mutation, and/or high or abnormal SOD) level in an individual comprising administering to the individual any of the siRNA, compositions, and/or pharmaceutical compositions described herein.

[0300] Embodiments of the present application are also based in part on the discovery that the SOD1 mRNA inhibitory oligonucleotide agents comprises a siRNA having a sense strand that is at least 85%, at least 90%, or at least 95% homology to the nucleotide sequence selected from the group of DS17-0001 (SEQ ID NO: 384), DS17-0002 (SEQ ID NO: 372), DS17-0003 (SEQ ID NO: 409), DS17-0004 (SEQ ID NO: 357), DS17-0005 (SEQ ID NO: 486), DS17-0029 (SEQ ID NO: 588), DS17-01N3 (SEQ ID NO: 912), DS17-02N3 (SEQ ID NO: 914), DS17-03N3 (SEQ ID NO: 916), DS17-04N3 (SEQ ID NO 918), and DS17-05N3 (SEQ ID NO: 920).

[0301] In some other embodiments, the SOD1 mRNA inhibitory oligonucleotide agents comprises a siRNA having an antisense strand that is at least 85%, at least 90%, or at least 95% homology to the nucleotide sequence selected from the group of DS17-0001 (SEQ ID NO: 653), DS17-0002 (SEQ ID NO 641), DS17-0003 (SEQ ID NO: 678), DS17-0004 (SEQ ID NO: 626), DS17-0005 (SEQ ID NO: 755), DS17-0029 (SEQ ID NO: 857), DS17-01N3 (SEQ ID NO. 913), DS17-02N3 (SEQ ID NO: 915), DS17-03N3 (SEQ ID NO: 917), DS17-04N3 (SEQ ID NO 919), and DS17-05N3 (SEQ ID NO: 921).

[0302] In some embodiments, the SOD1 mRNA inhibitory oligonucleotide agent comprises a siRNA, wherein the sense strand and the antisense strand of the siRNA have nucleotide sequences that is independently at least 85%, at least 90%, or at least 95% homology to the nucleotide sequence pairs selected from the group of: DS17-0001 (SEQ ID NO: 384 and SEQ ID NO: 653), DS17-0002 (SEQ ID NO: 372 and SEQ ID NO: 641), DS17-0003 (SEQ ID NO. 409 and SEQ ID NO: 678), DS17-0004 (SEQ ID NO: 357 and SEQ ID NO: 626), DS17-0005 (SEQ ID NO: 486 and SEQ ID NO: 755), DS117-0029 (SEQ ID NO: 588 and SEQ ID NO: 857), DS17-01N3 (SEQ ID NO: 912 and SEQ ID NO: 913), DS17-02N3 (SEQ ID NO: 914 and SEQ ID NO: 915), DS17-03N3 (SEQ ID NO: 916 and SEQ ID NO: 917), DS17-04N3 (SEQ ID NO: 918 and SEQ ID NO: 919), and DS17-05N3 (SEQ ID NO: 920 and SEQ ID NO 921).

[0303] A siRNA targeting 3′UTR of the SOD1 gene to inhibit SOD1 mRNA transcript level in a cell is also provided by the present disclosure. The siRNA comprises an oligonucleotide sequence having a length ranging from 16 to 35 consecutive nucleotides, wherein the continuous oligonucleotide sequence comprises a nucleotide sequence having at least 75%, at least 80%, at least 85%, at least 90%, at least 95% or 100% homology or complementarity to an equal length portion of SEQ ID NO:59, wherein the siRNA inhibits the mRNA transcript of SOD) gene by at least 80% as compared to the baseline of SOD1 mRNA level.

[0304] Surprisingly, the inventors discovered that the functional siRNAs capable of inhibiting the SOD1 mRNA transcript level were not randomly distributed on the SOD1 gene or particularly 3′-UTR of the SOD1 gene but were clustered in certain specific hotspot regions. Only some regions on the 3′-UTR of SOD1 gene are in favor of the siRNAs' function of inhibiting, for example, the regions 549 to 562 (H1; SEQ ID NO:61) and 568 to 580 (H2; SEQ ID NO 63) of SOD1 gene. Likewise, merely one region on the 3′-UTR of SOD1 gene are in favor of the ASOs' function of inhibiting, that is, the regions 552 to 566 (H3; SEQ ID NO:65). The regions disclosed herein so called “hotspots”.

[0305] The inventors also discovered that optimal target sequences/sense strand of an siRNA within the SOD1 gene or particularly 3′-UTR of the SOD1 gene include sequences having: (1) a GC content between 35% and 65%; (2) less than 5 consecutive identical nucleotides; (3) 3 or less dinucleotide repeats; and (4) 3 or less trinucleotide repeats. As a beneficial consequence, a target sequence (e.g., an isolated nucleic acid sequence comprising the target sequence), upon interacting with the siRNA, can inhibit the SOD1 mRNA transcript level by at least 80% as compared to a baseline level of SOD1 mRNA. Based at least in part on these discoveries, the present disclosure features siRNA, compositions, and pharmaceutical compositions for inhibiting the SOD1 mRNA transcript level by at least 80% as compared to baseline levels of SOD1 mRNA. Also provided herein are methods for preventing or treating a disease or condition induced by elevated level of SOD1 protein in a cell in an individual comprising administering any of the siRNA, compositions, and/or pharmaceutical compositions described herein.

[0306] Therefore, the present application discloses a hotspot of siRNA in the 3′-UTR of the SOD1 gene, wherein the oligonucleotide agent disclosed in the present application having at least 75%, at least 80%, at least 85%, at least 90%, at least 95% or 100% homology or complementarity to an equal length portion of the hotspot, wherein the oligonucleotide agent inhibits the mRNA transcript of SOD1 gene by at least 80% as compared to the baseline of SOD1 mRNA level.

[0307] The present application further discloses an isolated target site of siRNA in the 3′-UTR of the SOD1 gene, wherein the isolated target site has a nucleic acid sequence having at least 75%, at least 80%, at least 85%, at least 90%, at least 95% or 100% homology to a sequence selected from SEQ ID NOs:1068-1113.

[0308] In some embodiments, the sense strand of the siRNA has a nucleotide sequence that is at least 75%, at least 80%, at least 85%, at least 90%, at least 95%, at least 97%, at least 99% or 100% identical to the nucleotide sequence selected from SEQ ID NOs 976-1021. In some embodiments, the antisense strand of the siRNA has a nucleotide sequence that is at least 75%, at least 80%, at least 85%, at least 90%, at least 95%, at least 97%, at least 99% or 100% identical to the nucleotide sequence selected from SEQ ID NOs: 1022-1067 In certain embodiments, the select target region of the SOD1 gene comprises a nucleotide sequence that is at least 75%, at least 80%, at least 85%, at least 90%, at least 95%, at least 97%, at least 99% or 100% identical to the nucleotide sequence selected from group of: SEQ ID NOs: 1068-1113.

[0309] In some embodiments, the SOD1 mRNA inhibitory oligonucleotide agent comprises a siRNA, wherein the siRNA comprises a sense strand and an antisense strand having nucleotide sequences that is independently at least 85%, at least 90%, or at least 95% homology to the nucleotide sequence pairs selected from the group of DS17-01M3 (SEQ ID NO: 922 and SEQ ID NO: 923), DS17-02M3 (SEQ ID NO: 924 and SEQ ID NO: 925), DS17-03M3 (SEQ ID NO: 926 and SEQ ID NO: 927), DS17-04M3 (SEQ ID NO: 928 and SEQ ID NO: 929), and DS17-05M3 (SEQ ID NO: 930 and SEQ ID NO: 931).

[0310] In addition, the siRNAs provided in Tables 3 and 22 identify a site in a SOD1 transcript that is susceptible to RISC-mediated cleavage. As such, the present invention further features siRNAs that target within one of such sequences. As used herein, a siRNA is said to target within a particular site of an RNA transcript if the siRNA promotes cleavage of the transcript anywhere within that particular site. Such a siRNA will generally include at least 15 contiguous nucleotides from one of the sequences provided in Tables 3 or 22 coupled to additional nucleotide sequences taken from the region contiguous to the selected sequence in a SOD1 gene.

[0311] The siRNAs of the oligonucleotide agent described herein include an RNA strand (the antisense strand) having a region which is 60 nucleotides or less in length, i.e., 15-40 nucleotides in length, generally 19-25 nucleotides in length, which region is substantially complementary to at least part of a mRNA transcript of a SOD1 gene. The use of these siRNAs enables the targeted degradation of mRNAs of genes that are implicated in pathologies associated with SOD1 expression in mammals. Exceptionally low dosages of SOD1 siRNAs in particular can specifically and efficiently mediate RNAi, resulting in significant inhibition of expression of a SOD1 gene Using cell-based assays, the present inventors have demonstrated that siRNAs targeting SOD1 can specifically and efficiently mediate RNAi, resulting in significant inhibition of expression of a SOD1 gene. Thus, methods and oligonucleotide agents including these siRNAs are useful for treating pathological processes that can be mediated by down regulating SOD), such as in the treatment of a disorder that causes elevated SOD1 levels, e.g., amyotrophic lateral sclerosis (ALS). The following detailed description discloses how to make and use oligonucleotide agents containing siRNAs to inhibit the expression of a SOD1 gene, as well as oligonucleotide agents and methods for treating diseases and disorders caused by the expression of this gene.

[0312] In some embodiments, the continuous oligonucleotide sequence of the siRNA has five or less, i.e., 5, 4, 3, 2, 1, or 0 nucleotide differences or mismatches relative to the equal length portion of SOD1 mRNA. In some embodiments, the continuous oligonucleotide sequence of the sense strand of siRNA has three or less, i.e., 3, 2, 1, or 0 nucleotide differences or mismatches relative to the equal length portion of SOD mRNA. In some embodiments, the continuous oligonucleotide sequence of the antisense strand of siRNA has three or less, i.e., 3, 2, 1, or 0 nucleotide differences or mismatches relative to the equal length portion of SOD1 mRNA.

[0313] In some embodiments, the SOD1 mRNA disclosed herein does not contain a nucleotide mutation. In some embodiments, the SOD1 mRNA disclosed herein contains at least one nucleotide mutation. In some embodiments, the SOD1 mRNA disclosed herein contains at least one nucleotide mutation on the targeting site of the siRNA. In some embodiments, the SOD1 mRNA disclosed herein contains at least one nucleotide mutation upper stream and/or downstream the targeting site of the siRNA.

[0314] In some embodiments, the differences or mismatches locate in the middle or 3′ terminus of the oligonucleotide sequence of the siRNA. Methods and principles of siRNA molecule design are well known to those skilled in the art and are described in detail in, for example, Place et. al., Molecular Therapy Nucleic Acids (2012) 1, e15; and L1 et. al., PNAS, 2006, vol. 103, no. 46, 17337-17342, which are herein incorporated by reference in their entireties.

[0315] In one aspect, an RNA interference agent includes a single-stranded RNA that interacts with a target RNA sequence to direct the cleavage of the target RNA. Without wishing to be bound by theory, long double-stranded RNA introduced into plants and invertebrate cells is broken down into siRNA by a Type III endonuclease known as Dicer (Sharp et al., Genes Dev. 2001, 15:485). Dicer, a ribonuclease-III-like enzyme, processes the dsRNA into 19-23 base pair short interfering RNAs with characteristic two base 3′ overhangs (Bernstein, et al., (2001) Nature 409:363). The siRNAs are then incorporated into an RNA-induced silencing complex (RISC) where one or more helicases unwind the siRNA duplex, enabling the complementary antisense strand to guide target recognition (Nykanen, et al., (2001) Cell 107:309). Upon binding to the appropriate target mRNA, one or more endonucleases within the RISC cleaves the target to induce silencing (Elbashir, et al., (2001) Genes Dev. 15:188). Thus, in one aspect the invention relates to a single-stranded RNA that promotes the formation of a RISC complex to effect silencing of the target gene.

[0316] In some embodiments, the siRNA disclosed herein comprises a sense strand and an antisense strand. The sense strand and the antisense strand comprise complementary regions capable of forming a double-stranded nucleic acid structure that inhibits the SOD1 transcription in a cell via the RNAi mechanism. The RNAi mechanism (also known as RNA interference) used herein refers to a mechanism that a double-strand nucleic acid structure is capable of downregulating target genes in a sequence-specific manner at the transcriptional level. The sense strand and the antisense strand of the siRNA can exist either on two different nucleic acid strands or on one nucleic acid strand (e.g., a contiguous nucleic acid sequence). When the sense strand and the antisense strand are located on two different strands, at least one strand of the siRNA has a 3′ overhang of 0 to 6 nucleotides in length, such that the overhangs of 0, 1, 2, 3, 4, 5 or 6 nucleotides in length, and in some cases, both strands have a 3′ overhang of 2 or 3 nucleotides in length.

[0317] The nucleotide of the overhang is, in some cases thymine deoxyribonucleotide (dT), or in some cases, natural overhangs which are nucleotides selected from or complementary to the corresponding position on the DNA target. When the sense strand and the antisense strand are located on one nucleic acid strand, in some cases, the siRNA is a hairpin single-stranded nucleic acid molecule, where the complementary regions of the sense strand and the antisense strand form a double-stranded nucleic acid structure with each other. In the siRNA disclosed herein, in some embodiments, the sense strand has a length ranging from 10 to 60 nucleotides. For example, in some embodiments, the sense strand and the antisense strand, independently comprises a length of 16, 17, 18, 19, 20, 21, 22, 23, 24, 25, 26, 27, 28, 29, 30, 31, 32, 33, 34 or 35 nucleotides. In some embodiments, the antisense strand has a length ranging from 10 to 60 nucleotides. For example, in some embodiments, the sense strand and the antisense strand, independently comprises a length of 16, 17, 18, 19, 20, 21, 22, 23, 24, 25, 26, 27, 28, 29, 30, 31, 32, 33, 34 or 35 nucleotides.

[0318] In some embodiments, one strand of the siRNA has at least 75% (e.g., at least about 79%, about 80%, about 85%, about 90%, about 95% or about 99%) sequence homology or complementarity to a nucleotide sequence fragment of a SOD1 gene transcript Specifically, the sense strand of the siRNA disclosed herein has at least 75% (e.g., at least about 79%, about 80%, about 85%, about 90%, about 95% or about 99%) sequence homology to a nucleotide sequence fragment of a SOD1 gene transcript, and the antisense strand of the siRNA disclosed herein has at least 75% (e.g., at least about 79%, about 80%, about 85%, about 90%, about 95% or about 99%) sequence homology to a nucleotide sequence fragment of a SOD1 gene transcript.

[0319] In some embodiments, the sense strand of the siRNA disclosed herein has at least 75% (e.g., at least about 79%, about 80%, about 85%, about 90%, about 95% or about 99%) sequence homology to a nucleotide sequence selected from group of SEQ ID NOs: 976-1021. In some embodiments, the antisense strand of the siRNA disclosed herein has at least 75% (e.g., at least about 79%, about 80%, about 85%, about 90%, about 95% or about 99%) sequence homology to a nucleotide sequence selected from the group of SEQ ID NOs 1022-1067.

[0320] In certain embodiments, one strand of the siRNA can have five or less, i.e., 5, 4, 3, 2, 1, or 0 nucleotide differences or mismatches relative to a nucleotide sequence of any portion of SEQ ID NO: 59 Specifically, the sense strand of the si RNA disclosed herein can have three or less, i.e., 3, 2, 1, or 0 nucleotide differences relative to the nucleotide sequence selected from the group of SEQ ID NOs: 976-1021, and the antisense strand of the siRNA disclosed herein can have three or less, i.e., 3, 2, 1, or 0 nucleotide differences relative to the nucleotide sequence selected from the group of SEQ ID NOs: 1022-1067. In some embodiments, the differences or mismatches locate in the middle or 3′ terminus of the sense or antisense strand of the siRNA.

[0321] In some embodiments, the antisense strand disclosed herein is capable of interacting with a target nucleic acid sequence of a mRNA of a SOD1 gene in a sequence specific manner, meaning that the antisense strand is capable of undergoing hybridization to a target nucleic acid through hydrogen bonding. In some embodiments, an antisense strand has a nucleotide sequence that, when written in the 5′ to 3′ direction, comprises the reverse complement of the target portion of a target nucleic acid to which it is targeted. In certain such embodiments, an antisense strand has a nucleotide sequence that, when written in the 5′ to 3′ direction, comprises the reverse complement of the target portion in a fragment of a SOD1 gene transcript.

### Antisense Oligonucleotide (ASO)

[0322] The present disclosure also provides antisense oligonucleotides (ASOs) capable of inhibit SOD1 mRNA level in a cell. The ASOs modulates a RNAi-SOD1 mRNA-SOD1 protein pathway by a RNase H-dependent mechanism of action and thus can be used to treat SOD1 protein-related disease, e.g., for amyotrophic lateral sclerosis (ALS) patients.

[0323] Disclosed in the present application is an oligonucleotide agent comprising an antisense oligonucleotide (ASO), which comprises an oligonucleotide sequence having a length ranging from 12 to 30 consecutive nucleotides, wherein the continuous oligonucleotide sequence comprises a nucleotide sequence having at least 75%, at least 80%, at least 85%, at least 90%, at least 95% or 100% homology or complementarity to an equal length portion of SEQ ID NO:59, wherein the ASO inhibits the mRNA transcript of SOD1 gene by at least 60% as compared to the baseline of SOD1 mRNA level. In some embodiments, the ASO inhibits the mRNA transcript of SOD1 gene by greater 60% as compared to the baseline of SOD1 mRNA level. For instance, the ASO inhibits the mRNA transcript of SOD1 gene by at least about 65%, at least about 70%, at least about 75%, at least about 80%, at least about 85%, at least about 90%, at least about 95%, at least about 100%, or greater than 100% as compared to the baseline of SOD1 mRNA level.

[0324] Further discloses in the present application is that the ASOs in the 3′-UTR of the SOD1 gene capable of inhibiting the SOD1 mRNA transcript level were not randomly distributed on the SOD1 gene or particularly 3′-UTR of the SOD1 gene but were clustered in certain specific hotspot regions. Only some regions on the 3′-UTR of SOD1 gene are in favor of the ASOs' function of inhibiting, for example, the region SEQ ID NO:65 (H3) of SOD1 gene. In some embodiments, the ASO disclosed herein has at least 75%, at least 80%, at least 85%, at least 90%, at least 95% or 100% complementarity to an equal length portion of the hotspot SEQ ID NO:65 (H3). In some embodiments, the ASO inhibits the mRNA transcript of SOD1 gene by at least 60% as compared to the baseline of SOD1 mRNA level. In some embodiments, the ASO comprising a single-stranded oligonucleotide sequence that is at least 75%, at least 80%, at least 85%, at least 90%, at least 95%, at least 97%, at least 99% or 100% identical to the nucleotide sequence selected from chemically modified SEQ ID NOs: 1155-1195. In some embodiments, the ASO comprising a single-stranded oligonucleotide sequence that is at least 75%, at least 80%, at least 85%, at least 90%, at least 95%, at least 97%, at least 99% or 100% identical to the nucleotide sequence selected from the unmodified naked sequences of SEQ ID NOs: 1155-1195.

[0325] In some embodiments, the ASO is a single-stranded oligonucleotide comprising a 5′ end and a 3′ end.

[0326] In some embodiments, the length of the antisense oligonucleotide comprises a nucleotide length ranging from 12 to 30 nucleotides, such as 13 nucleotides or more, 14 nucleotides or more, 15 nucleotides or more, 16 nucleotides or more, 17 nucleotides or more, 18 nucleotides or more, 19 nucleotides or more, 20 nucleotides or more, 21 nucleotides or more, 22 nucleotides or more, 23 nucleotides or more, 24 nucleotides or more, 25 nucleotides or more. In some embodiments, the length of the ASO is 15 to 25 contiguous oligonucleotides.

[0327] In some embodiments, the ASO comprises a nucleotide sequence selected from the nucleotide sequence group of SEQ ID NOs: 1155-1195.

### Chemical Modifications

[0328] All nucleotides of the oligonucleotides described herein may be natural, i.e., non-chemically modified, nucleotides or at least one nucleotide may be a chemically modified nucleotide. Non-limiting examples of the chemical modification include one or more of a combination of the following: a) modification of a phosphodiester bond of nucleotides in the oligonucleotide sequence; b) modification of 2′-OH of the ribose in the nucleotide, c) modification of a base in the nucleotide, d) at least one nucleotide in the oligonucleotide sequence being a locked nucleic acid, and e) at least one nucleotide in the oligonucleotide sequence being a deoxyribonucleotide (DNA).

[0329] In some embodiments, the nucleotides or oligonucleotides of the present application is chemically modified to enhance stability or other beneficial characteristics. The nucleic acids featured in the present application may be synthesized and/or modified by conventional methods, such as those described in “Current protocols in nucleic acid chemistry,” Beaucage, S L. et al. (Edrs.), John Wiley & Sons, Inc, New York, N.Y., USA, which is hereby incorporated herein by reference. Modifications include, for example, (a) end modifications, e.g., 5′ end modifications (phosphorylation, conjugation, inverted linkages, etc.) 3′ end modifications (conjugation, DNA nucleotides, inverted linkages, etc.), (b) base modifications, e.g., replacement with stabilizing bases, destabilizing bases, or bases that base pair with an expanded repertoire of partners, removal of bases (abasic nucleotides), or conjugated bases, (c) sugar modifications (e.g., at the 2′ position or 4′ position) or replacement of the sugar, as well as (d) backbone modifications, including modification or replacement of the phosphodiester linkages Specific examples of siRNA molecules that can be used in this present application include but are not limited to RNAs containing modified backbones or no natural internucleoside linkages. In some embodiments, RNAs having modified backbones include, among others, those that do not have a phosphorus atom in the backbone. In some embodiments, modified RNAs that do not have a phosphorus atom in their internucleoside backbone can also be oligonucleosides. In some embodiments, the modified oligonucleotide will have a phosphorus atom in its internucleoside backbone.

[0330] Chemical modifications of nucleotides or oligonucleotides in the present disclosure are well known to those skilled in the art, and modifications of the phosphodiester bond refer to modifications of oxygen in the phosphodiester bond, including phosphorothioate modifications and boronated phosphate modifications. The modifications disclosed herein stabilize an oligonucleotide structure, maintaining high specificity and high affinity for base pairing. The modifications disclosed herein also stabilize an ACO structure and maintain its delivering accessory properties including bioavailability, biodistribution, and/or cellular uptake of the oligonucleotide agent in various tissues prefrontal cortex, cerebellum, spinal cord (e.g., cervical, thoracic, lumber), muscle, liver, and kidney.

[0331] In some embodiments, the chemical modification is to substitute the phosphodiester bond with phosphorothioate (PS) bond on the backbone of the nucleotide sequence of the oligonucleotide agent disclosed herein. In some embodiments, the oligonucleotide agent disclosed herein comprises at least one PS backbone modification. In some embodiments, the ACO comprises at least one PS backbone modification. In some embodiments, the oligonucleotide agent comprises at least 2 PS, at least 3 PS, at least 4 PS, at least 5 PS, at least 6 PS, or greater than 6 PS backbone modifications. In some embodiments, about 90% to about 95% of the phosphodiester backbone bond of ACO are substituted with phosphorothioate (PS) bond. In some embodiments, the oligonucleotide agent comprises at least one PS backbone modification on 5′ end, 3′ end or internal site of the sense strand of the dsRNA. In some embodiments, the oligonucleotide agent comprises at least one PS backbone modification on 5′ end, 3′ end or internal site of the antisense strand of the dsRNA. In some embodiments, the oligonucleotide agent comprises at least one PS backbone modification on 5′ end, 3′ end or internal site of the single strand of the ACO.

[0332] In some embodiments, the nucleotides or oligonucleotides of the present application includes at least one chemically modified nucleotide which is modified at 2′-OH in pentose of a nucleotide, i.e., the introduction of certain substituents at the hydroxyl position of the ribose, such as 2′-fluoro modification, 2′-oxymethyl modification, 2′-oxyethylidene methoxy modification, 2,4′-dinitrophenol modification, locked nucleic acid (LNA), 2′-amino modification or 2′-deoxy modification, e.g., a 2′-deoxy-2′-fluoro modified nucleotide, a 2′-deoxy-modified nucleotide.

[0333] In some embodiments, the nucleotides or oligonucleotides of the present application includes at least one chemically modified nucleotide which is modified at the base of the nucleotide, e.g., 5′-bromouracil modification, 5′-iodouracil modification, N-methyluracil modification, or 2.6-diaminopurine modification.

[0334] In some embodiments, the chemical modification of the nucleotides or oligonucleotides in the present application is an addition of a (E)-vinylphosphonate moiety at the 5′ end of the sense or antisense sequence. In some embodiments, the chemical modification of the at least one chemically modified nucleotide is an addition of a 5′-methyl cytosine moiety at the 5′ end of the sense or antisense sequence.

[0335] In some embodiments, the nucleotides or oligonucleotides in the present application are modified at the base of the nucleotide, e.g., 5′-bromouracil modification, 5′-iodouracil modification, N-methyluracil modification, or 2,6-diaminopurine modification. In some embodiments, at least one oligonucleotide in the oligonucleotide agent includes at least one modified nucleotide, e.g., a 2′-O-methyl modified nucleotide, a nucleotide comprising a 5′-phosphorothioate group, a terminal nucleotide linked to a cholesteryl derivative or dodecanoic acid bisdecylamide group, a 2′-deoxy-2′-fluoro modified nucleotide, a 2′-deoxy-modified nucleotide, a locked nucleotide, an abasic nucleotide, a 2′-amino-modified nucleotide, a 2′-alkyl-modified nucleotide, a morpholino nucleotide, a phosphoramidate, and a non-natural base comprising nucleotide. In some embodiments, the first and second dsRNAs include “endo-light” modification with 2′-O-methyl modified nucleotides and nucleotides comprising a 5′-phosphorothioate group.

[0336] Modified oligonucleotide backbones include, for example, phosphorothioates, chiral phosphorothioates, phosphorodithioates, phosphotriesters, aminoalkylphosphotriesters, methyl and other alkyl phosphonates including 3′-alkylene phosphonates and chiral phosphonates, phosphinates, phosphoramidates including 3′-amino phosphoramidate and aminoalkylphosphoramidates, thionophosphoramidates, thionoalkylphosphonates, thionoalkylphosphotriesters, and boranophosphates having normal 3′-5′ linkages, 2′-5′ linked analogs of these, and those) having inverted polarity wherein the adjacent pairs of nucleoside units are linked 3′-5′ to 5′-3′ or 2′-5′ to 5′-2′. Various salts, mixed salts and free acid forms are also included.

[0337] Non-limiting examples of preparation of the phosphorus-containing linkages include, but are not limited to, U.S. Pat. Nos. 3,687,808; 4,469,863; 4,476,301; 5,023,243; 5,177,195; 5,188,897; 5,264,423; 5,276,019; 5,278,302; 5,286,717; 5,321,131; 5,399,676; 5,405,939; 5,453,496; 5,455,233; 5,466,677, 5,476,925; 5,519,126; 5,536,821; 5,541,316, 5,550,111; 5,563,253; 5,571,799; 5,587,361; 5,625,050; 6,028,188; 6,124,445; 6,160,109; 6,169,170; 6,172,209, 6,239,265; 6,277,603; 6,326,199; 6,346,614, 6,444,423; 6,531,590; 6,534,639; 6,608,035, 6,683,167; 6,858,715; 6,867,294; 6,878,805, 7,015,315; 7,041,816; 7,273,933, 7,321,029; and U.S. Pat. RE39464, which are herein specifically each incorporated by reference in their entireties.

[0338] In some embodiments, the nucleotides or oligonucleotides comprise one or more of RNA, DNA, BNA, LNA or peptide nucleic acid (PNA).

[0339] The RNA of a siRNA or saRNA can also be modified to include one or more locked nucleic acids (LNA). A locked nucleic acid is a nucleotide having a modified ribose moiety in which the ribose moiety comprises an extra bridge connecting the 2′ and 4′ carbons. This structure effectively “locks” the ribose in the 3′-endo structural conformation. The addition of locked nucleic acids to siRNAs has been shown to increase siRNA stability in serum, and to reduce off-target effects (Elmen, J. et al., (2005) Nucleic Acids Research 33(1):439-447; Mook, O R. et al., (2007) Mol Canc Ther 6(3):833-843; Grunweller, A. et al., (2003) Nucleic Acids Research 31(12) 3185-3193). Representative U.S. patents that teach the preparation of locked nucleic acid nucleotides include, but are not limited to, the following: U.S. Pat. Nos. 6,268,490; 6,670,461; 6,794,499; 6,998,484; 7,053,207; 7,084,125; and 7,399,845, each of which is herein incorporated by reference in its entirety.

[0340] In other RNA mimetics suitable or contemplated for use in siRNAs, both the sugar and the internucleoside linkage, i.e., the backbone, of the nucleotide units are replaced with novel groups. The base units are maintained for hybridization with an appropriate nucleic acid target compound. One such oligomeric compound, an RNA mimetic that has been shown to have excellent hybridization properties, is referred to as a peptide nucleic acid (PNA). In PNA compounds, the sugar backbone of an RNA is replaced with an amide containing backbone, in particular an aminoethylglycine backbone. The nucleobases are retained and are bound directly or indirectly to aza nitrogen atoms of the amide portion of the backbone.

[0341] Representative U.S. patents that teach the preparation of PNA compounds include, but are not limited to, U.S. Pat. Nos. 5,539,082, 5,714,331; and 5,719,262, each of which is herein incorporated by reference. Further teaching of PNA compounds can be found, for example, in Nielsen et al., Science, 1991, 254, 1497-1500.

[0342] In some embodiments, at least about 50%, at least about 60%, at least about 70%, at least about 80%, at least about 90%, or least about 95%, or about 100% nucleotides of the single-stranded oligonucleotide are chemically modified nucleotides.

[0343] In some embodiments, the sense strand and the antisense strand of the oligonucleotide agent independently comprise at least about 10%, at least about 20%, at least about 30%, at least about 40%, at least about 50%, at least about 60%, at least about 70%, at least about 80%, at least about 90%, at least about 95%, or about 100% nucleotides which are chemically modified nucleotides.

[0344] These modifications may increase the bioavailability of the oligonucleotides, increase affinity for the target sequence, and enhance resistance to nuclease hydrolysis in a cell.

[0345] In addition, to facilitate entry of the oligonucleotides into a cell, lipophilic groups such as cholesterol may be introduced at the ends of the sense or antisense strands of the oligonucleotides on the basis of the above modifications to facilitate action through a cell membrane composed of lipid bilayers and gene promoter regions within the nuclear membrane and nucleus.

[0346] In some embodiments, the oligonucleotides of the present application which, upon contact with a cell, are effective in deactivating or downregulating the expression of one or more genes in the cell, preferably by at least 10% (e.g., at least 15%, at least 20%, at least 25%, at least 30%, at least 35%, at least 40%, at least 45%, at least 50%, at least 55%, at least 60%, at least 65%, at least 70%, at least 75%, at least 80%, at least 85%, at least 90%, or at least 95%).

[0347] In some embodiments, the oligonucleotides of the present application which, upon contact with a cell, are effective in activating or upregulating the expression of one or more genes in the cell, preferably by at least 10% (e.g., at least 20%, at least 30%, at least 40%, at least 50%, at least 60%, at least 70%, at least 80%, at least 90%, at least 100%, at least 150%, at least 200%, at least 300%, at least 500%, at least 800%, at least 1000%, at least 2000%, or at least 5000%).

[0348] One aspect of the application provides a cell comprising an oligonucleotide agent of the present application or a nucleic acid encoding the oligonucleotide agent of the present application. In one embodiment, the cell is a mammalian cell, preferably a human cell. Such cells may be ex vivo, such as cell lines or cell lines, and the like, or may be present in mammalian bodies, such as humans, including infants, children or adults.

[0349] In some embodiments, the at least one chemical modified oligonucleotide is the non-targeting single-stranded oligonucleotide. In some embodiments, the at least one chemical modified oligonucleotide is the targeting double stranded oligonucleotide. In certain embodiments, the at least one chemical modified oligonucleotide is the non-targeting single-stranded oligonucleotide and the targeting double stranded oligonucleotide.

### Covalent Linkage

[0350] Aspects of the present application include an oligonucleotide agent comprising a double-stranded targeting oligonucleotide and a non-targeting single-stranded oligonucleotide, e.g., an ACO, that are covalently linked.

[0351] In some embodiments, a double-stranded targeting oligonucleotide and a non-targeting single-stranded oligonucleotide are covalently linked by a linking component.

[0352] In some embodiments, the double-stranded oligonucleotide and the non-targeting single-stranded oligonucleotide are linked with a covalent linker. In some embodiments, the linker is a disulfide linker. Various combinations of strands can be linked, e.g., the first and second dsRNA sense strands are covalently linked or, e.g., the first and second dsRNA antisense strands are covalently linked.

[0353] In some embodiments, the sense strand of the double stranded targeting oligonucleotide is covalently linked to the single-stranded oligonucleotide. In some embodiments, the antisense strand of the double stranded targeting oligonucleotide is covalently linked to the single-stranded oligonucleotide.

[0354] In some embodiments, any of the oligonucleotides in the oligonucleotide agent of the present application includes a linking component.

[0355] Linkers typically comprise a direct bond or an atom such as oxygen or sulfur, a unit such as NR¹, C(O), C(O)O, C(O)NR¹, SO, SO₂, SO₂NH or a chain of atoms, such as substituted or unsubstituted alkyl, substituted or unsubstituted alkenyl, substituted or unsubstituted alkynyl, arylalkyl, arylalkenyl, arylalkynyl, heteroarylalkyl, heteroarylalkenyl, heteroarylalkynyl, heterocyclylalkyl, heterocyclylalkenyl, heterocyclylalkynyl, aryl, heteroaryl, heterocyclyl, cycloalkyl, cycloalkenyl, alkylarylalkyl, alkylarylalkenyl, alkylarylalkynyl, alkenylarylalkyl, alkenylarylalkenyl, alkenylarylalkynyl, alkynylarylalkyl, alkynylarylalkenyl, alkynylarylalkynyl, alkylheteroarylalkyl, alkylheteroarylalkenyl, alkylheteroarylalkynyl, alkenylheteroarylalkyl, alkenylheteroarylalkenyl, alkenylheteroarylalkynyl, alkynylheteroarylalkyl, alkynylheteroarylalkenyl, alkynylheteroarylalkynyl, alkylheterocyclylalkyl, alkylheterocyclylalkenyl, alkylhererocyclylalkynyl, alkenylheterocyclylalkyl, alkenylheterocyclylalkenyl, alkenylheterocyclylalkynyl, alkynylheterocyclylalkyl, alkynylheterocyclylalkenyl, alkynylheterocyclylalkynyl, alkylaryl, alkenylaryl, alkynylaryl, alkylheteroaryl, alkenylheteroaryl, alkynylhereroaryl, where one or more methylenes can be interrupted or terminated by O, S, S(O), SO₂, N(R′)₂, C(O), cleavable linking group, substituted or unsubstituted aryl, substituted or unsubstituted heteroaryl, substituted or unsubstituted heterocyclic; where R¹ is hydrogen, acyl, aliphatic or substituted aliphatic.

[0356] Without limitations, various types of linker functionality can be included in the subject conjugates, including but not limited to cleavable linkers, and non-cleavable linkers, as well as reversible linkers and irreversible linkers.

[0357] In some embodiments, the linker is a cleavable linker. Cleavable linkers are those that rely on processes inside a target cell to liberate the two parts the linker is holding together, e.g., the ACO and the dsRNA, as reduction in the cytoplasm, exposure to acidic conditions in a lysosome or endosome, or cleavage by specific enzymes (e.g., proteases) within the cell. As such, cleavable linkers allow the dsRNA to be released in its original form after the conjugate has been internalized and processed inside a target cell. Cleavable linkers include, but are not limited to, those whose bonds can be cleaved by enzymes (e.g., peptide linkers); reducing conditions (e.g., disulfide linkers); or acidic conditions (e.g., hydrazones and carbonates).

[0358] In some embodiments, the linking component is selected from one or more of ethylene glycol chain, an alkyl chain, a peptide, nucleic acid, carbohydrates, thiol linkage, a phosphodiester, a phosphorothioate, a phosphoramidate, an amide, and a carbamate. In some embodiments, the linking component includes, but is not limited to:
[0359] a) L1 or S18 (spacer-18 linker) (1,1-bis(4-methoxyphenyl)-1-phenyl-2,5,8,11,14,17-hexaoxanonadecan-19-yl (2-cyanoethyl) diisopropylphosphoramidite);
[0360] b) L4 or C6 (spacer-C6 linker) (6-(bis(4-methoxyphenyl)(phenyl)methoxy)hexyl (2-cyanoethyl) diisopropylphosphoramidite);
[0361] c) L6 (1,1-bis(4-methoxyphenyl)-1-phenyl-2,5,8,11,14-pentaoxahexadecan-16-yl (2-cyanoethyl) diisopropylphosphoramidite);
[0362] d) L9 or S9 (spacer-9 linker) (2-(2-(2-(bis(4-methoxyphenyl)(phenyl)methoxy)ethoxy)ethoxy)ethyl (2-cyanoethyl) diisopropylphosphoramidite);
[0363] e) L10 or C3 (spacer-C3 linker) (3-(bis(4-methoxyphenyl)(phenyl)methoxy)propyl (2-cyanoethyl) diisopropylphosphoramidite);
[0364] f) L12(d spacer) ((2R,3S)-2-((bis(4-methoxyphenyl)(phenyl)methoxy)methyl)tetrahydrofuran-3-yl (2-cyanoethyl) diisopropylphosphoramidite);
[0365] g) L13 or C12 (spacer-C12 linker) (12-(bis(4-methoxyphenyl)(phenyl)methoxy)dodecyl (2-cyanoethyl) diisopropylphosphoramidite);
[0366] h) L14 (spacer-L14 linker) (((1r,4r)-4-((bis(4-methoxyphenyl)(phenyl)methoxy)methyl)cyclohexyl)methyl (2-cyanoethyl) diisopropylphosphoramidite);
[0367] i) L5 (spacer-L15 linker) (4-(2-(bis(4-methoxyphenyl)(phenyl)methoxy)ethyl)phenethyl (2-cyanoethyl) diisopropylphosphoramidite);
[0368] j) L16 (spacer-L16 linker) (2-(1-(2-(bis(4-methoxyphenyl)(phenyl)methoxy)ethyl)cyclohexyl)ethyl (2-cyanoethyl) diisopropylphosphoramidite);
[0369] k) C6x1 ((2S,3S,4S,5S)-2-((bis(4-methoxyphenyl)(phenyl)methoxy)methyl)-5-methoxy-4-(pent-4-yn-1-yloxy)tetrahydrofuran-3-yl (2-cyanoethyl) diisopropylphosphoramidite);
[0370] l) C6x2 ((2S,3S,4S,5S)-5-((bis(4-methoxyphenyl)(phenyl)methoxy)methyl)-2-methoxy-4-(pent-4-yn-1-yloxy)tetrahydrofuran-3-yl (2-cyanoethyl) diisopropylphosphoramidite);
[0371] m) C6x5 (2-((2-(bis(4-methoxyphenyl)(phenyl)methoxy)ethyl)(pent-4-yn-1-yl)amino)ethyl (2-cyanoethyl) diisopropylphosphoramidite), and
[0372] n) C6x7 ((9H-fluoren-9-yl)methyl (4-((2S,4R)-2-((bis(4-methoxyphenyl)(phenyl)methoxy)methyl)-4-((bis(diisopropylamino)phosphanyl)oxy)pyrrolidin-1-yl)-4-oxobutyl)carbamate).

[0373] In certain embodiments, the linking component comprises a compound structure shown in Table 1. In certain embodiments, the linking component conjugates to a nucleotide in the single-stranded oligonucleotide or the double-stranded oligonucleotide. In certain embodiments, the linking component conjugates at a nucleoside position selected from 5′-phosphate, 3′, base and 2′-H/OH of a nucleotide in the single-stranded oligonucleotide or the double-stranded oligonucleotide in certain embodiments, the linking component is Spacer phosphoramidite 18 (Phosphoramidous acid, N,N-bis(1-methylethyl)-, 19,19-bis(4-methoxyphenyl)-19-phenyl-3,6,9,12,15,18-hexaoxanonadec-1-yl 2-cyanoethyl ester).

TABLE 1
Linkers used in oligonucleotide agents

| Name | Formula | Structure |
|---|---|---|
| L1 or S18 (spacer-18 linker) | 1,1-bis(4-methoxyphenyl)-1- phenyl-2,5,8,11,14,17- hexaoxanonadecan- 19-yl (2-cyanoethyl) diisopropylphosphoramidite | [chemical structure] |
| L4 or C6 (spacer-C6 linker) | 6-(bis(4-methoxyphenyl) (phenyl)methoxy)hexyl (2-cyanoethyl) diisopropylphosphoramidite | [chemical structure] |
| L6 | 1,1-bis(4-methoxyphenyl)-1- phenyl-2,5,8,11,14- pentaoxahexadecan-16-yl (2-cyanoethyl) diisopropylphosphoramidite | [chemical structure] |
| L9 or S9 (spacer-9 linker) | 2-(2-(2-(bis(4- methoxyphenyl)(phenyl) methoxy) ethoxy)ethoxy)ethyl (2-cyanoethyl) diisopropylphosphoramidite | [chemical structure] |
| L10 or C3 (spacer-C3 linker) | 3-(bis(4-methoxyphenyl) (phenyl) methoxy)propyl (2-cyanoethyl) diisopropylphosphoramidite | [chemical structure] |
| L12(d spacer) | (2R, 3S)-2-((bis(4- methoxyphenyl)(phenyl) methoxy)methyl) tetrahydrofuran-3-yl (2-cyanoethyl) diisopropylphosphoramidite | [chemical structure] |
| L13 or C12 (spacer-C12 linker) | 12-(bis(4- methoxyphenyl)(phenyl) methoxy) dodecyl (2-cyanoethyl) diisopropylphosphoramidite | [chemical structure] |
| L14 (spacer-L14 linker) | ((1r, 4r)-4-((bis(4- methoxyphenyl)(phenyl) methoxy) methyl) cyclohexyl)methyl (2-cyanoethyl) diisopropylphosphoramidite | [chemical structure] |
| L15 (spacer-L15 linker) | 4-(2-(bis(4- methoxyphenyl)(phenyl) methoxy) ethyl)phenethyl (2-cyanoethyl) diisopropylphosphoramidite | [chemical structure] |
| L16 (spacer-L16 linker) | 2-(1-(2-(bis(4- methoxyphenyl) (phenyl)methoxy) ethyl)cyclohexyl) ethyl (2-cyanoethyl) diisopropylphosphoramidite | [chemical structure] |
| C6x1 | (2S,3S,4,5S)-2-((bis(4- methoxyphenyl)(phenyl) methoxy)methyl)-5- methoxy-4-(pent-4-yn-1-yloxy) tetrahydrofuran-3- yl (2-cyanoethyl) diisopropylphosphoramidite | [chemical structure] |
| C6x2 | (2S,3S,4S,5S)-5-((bis(4- methoxyphenyl )(phenyl) methoxy) methyl)-2-methoxy- 4-(pent-4-yn-1-yloxy) tetrahydrofuran-3- yl (2-cyanoethyl) diisopropylphosphoramidite | [chemical structure] |
| C6×5 | 2-((2-(bis(4- methoxyphenyl)(phenyl) methoxy) ethyl)(pent-4- yn-1-yl)amino)ethyl (2-cyanoethyl) diisopropylphosphoramidite | [chemical structure] |
| C6x7 | (9H-fluoren-9-yl)methyl (4-((2S, 4R) -2-((bis(4- methoxyphenyl)(phenyl) methoxy)methyl)-4- ((bis(diisopropylamino) phosphanyl)oxy)pyrrolidin- 1-yl)-4-oxobutyl)carbamate | [chemical structure] |
| Nucleoside | | [chemical structure] |

*n.b.: R, —Hor —OH or —OMe, or —MOE, or —F, or other 2′ chemical modifications.

[0374] In some embodiments, the double-stranded targeting oligonucleotide and the single-stranded oligonucleotide are covalently linked by a phosphodiester bond. In some embodiments, the double-stranded targeting oligonucleotide and the single-stranded oligonucleotide are covalently linked by a phosphorothioate bond.

[0375] In some embodiments, the double-stranded targeting oligonucleotide comprises a sense strand that is covalently linked to the single-stranded oligonucleotide. In some embodiments, the double-stranded targeting oligonucleotide comprises an antisense strand that is covalently linked to the single-stranded oligonucleotide.

[0376] In some embodiments, the double-stranded targeting oligonucleotide and the single-stranded oligonucleotide are covalently linked by one or more nucleotides.

[0377] Non-limiting examples of covalent linkers can be found in U.S. Patent Application Publication No. 20200332292, which is hereby incorporated by reference in its entirety. The covalent linker can join the double-stranded targeting oligonucleotide and the single-stranded oligonucleotide. In some embodiments, the covalent linker can join two sense strands, two antisense strands, one sense and one antisense strand, two sense strands and one antisense strand, two antisense strands and one sense strand, two sense and two antisense strands, an antisense strand and single-stranded oligonucleotide, a sense strand and inactivated oligonucleotide, and the like.

[0378] In certain embodiments, the covalent linker includes a nucleic acid (e.g., RNA and/or DNA) and/or a peptide. The linker can be single-stranded, double-stranded, partially single-strands, or partially double-stranded. In some embodiments the linker includes a disulfide bond. The linker can be cleavable or non-cleavable.

[0379] In certain embodiments, the covalent linker includes, e.g., dTsdTuu=(5′-2′deoxythymidyl-3′-thiophosphate-5′-2′deoxythymidyl-3′-phosphate-5′-uridyl-3‘-phosphate-S’-uridyl-3′-phosphate); rUsrU (a thiophosphate linker. 5′-uridyl-3′-thiophosphate-5′-uridyl-3′-phosphate); an rUrU linker; dTsdTaa (aadTsdT, 5′-2′deoxythymidyl-3′-thiophosphate-5′-2′deoxythymidyl-3′-phosphate-5′-adenyl-3′-phosphate-5′-adenyl-3′-phosphate); dTsdT (5′-2′deoxythyrnidyl-3′-thiophosphate-5′-2′ deoxythymidyl-3′-phosphate); or dTsdTuu=uudTsdT=5′-2′deoxythymidyl-3′-thiophosphate-5′-2′deoxythymidyl-3′-phosphate-5′-uridyl-3′-phosphate-5′-uridyl-3′-phosphate.

[0380] When the covalent linker is a RNA, the RNA linker may be composed of any combination of nucleotides. The combination of nucleotides may be adenine, uracil, guanosine, cytosine, or any combination thereof. The RNA linker may be any length. In some embodiments, the RNA linker is 2-50 nucleotides in length. When the RNA linker is 2-50 nucleotides in length, the RNA linker may be any intervening length such as 5-10, 10-15, or 15-20 nucleotides in length. In some embodiments, the covalent linker includes a polyRNA, such as poly(5′-adenyl-3′-phosphate-AAAAAAAA) or poly(5′-cytidyl-3′-phosphate-5′-uridyl-3′-phosphate-CUCUICUCU)), e.g., Xₙ single-stranded poly RNA linker wherein n is an integer from 2-50 inclusive, preferable 4-15 inclusive, most preferably 7-8 inclusive. Modified nucleotides or a mixture of nucleotides can also be present in said polyRNA linker. When the covalent linker is a DNA, the DNA linker may be composed of any combination of nucleotides. The combination of nucleotides may be adenine, thymine, guanosine, cytosine, or any combination thereof. The DNA linker may be any length. In some embodiments, the DNA linker is 1-50 nucleotides in length. When the DNA linker is 1-50 nucleotides in length, the DNA linker may be any intervening length such as 5-10, 10-15, or 15-20 nucleotides in length. The covalent linker can be a polyDNA, such as poly(5′-2′deoxythymidyl-3′-phosphate-TTTTTTTT), e.g., wherein n is an integer from 2-50 inclusive, preferable 4-15 inclusive, most preferably 7-8 inclusive Modified nucleotides or a mixture of nucleotides can also be present in said polyDNA linker, a single-stranded polyDNA linker wherein n is an integer from 2-50 inclusive, preferable 4-15 inclusive, most preferably 7-8 inclusive. Modified nucleotides or a mixture of nucleotides can also be present in said polyDNA linker.

[0381] In some embodiments, the covalent linker includes a disulfide bond, optionally a bis-hexyl-disulfide linker in one embodiment, the disulfide linker is

[chemical structure]

[0382] C₁₂H₂₆O₄PS₂
[0383] Exact Mass: 329.1010
[0384] Mol. Wt. 329.4362

[0385] In some embodiments, the covalent linker includes a peptide bond, e.g., include amino acids. In one embodiment, the covalent linker is a 1-10 amino acid long linker, preferably comprising 4-5 amino acids, optionally X-Gly-Phe-Gly-Y wherein X and Y represent any amino acid.

[0386] In some embodiments, the covalent linker includes HEG, a hexaethylenglycol linker.

### Orientation and Position of Covalent Linkage

[0387] Aspects of the present application include covalently linking the double-stranded targeting oligonucleotide and the non-targeting single-stranded oligonucleotide, e.g., an ACO, to form an oligonucleotide agent. In some embodiments, the orientation of the linkage and positioning of the double-stranded targeting oligonucleotide and the single-stranded oligonucleotide may enhance stability, oligonucleotide activity, or other beneficial characteristics, such as maximized target gene output, increased or decreased activity or expression (e.g., mRNA expression, protein expression, etc.) of one or more target genes.

[0388] In some embodiments, the single-stranded oligonucleotide is covalently linked to a 3′ end of the sense or antisense strand of the double-stranded target oligonucleotide; b) the single-stranded oligonucleotide is covalently linked to a 5′ end of the sense or antisense strand of the double-stranded targeting oligonucleotide, or c) the single-stranded oligonucleotide is covalently linked to an internal nucleotide between the 5′ end and the 3′ end of the sense or antisense strand of the double-stranded targeting oligonucleotide. In some embodiments, the internal nucleotide of the sense or antisense strand of the double-stranded targeting oligonucleotide is located at nucleotide position 2, 3, 4, 5, 6, 7, 8, 9, 10, 11, 12, or 13 from 5′ end of the sense or antisense strand; or located at nucleotide position 2, 3, 4, 5, 6, 7, 8, 9, 10, 11, 12, or 13 from 3′ end of the sense or antisense strand.

[0389] In some embodiments, an internal nucleotide of the sense or antisense strand of the double-stranded targeting oligonucleotide is substituted by one or more linking component or spacer which is covalently linked to the single-stranded oligonucleotide on its 5′ end or 3′ end (i.e., internal conjugated ODV). In some embodiments, the internal conjugated ODV has enhanced potency as compared to the 3′ or 5′ end conjugated ODV (i.e., ACO conjugated on 3′ or 5′ end of the sense or antisense strand of the double stranded oligonucleotide).

[0390] In certain embodiments, the 5′ end of the single-stranded oligonucleotide is conjugated to a linking component. In some embodiments, the 3′ end of the single-stranded oligonucleotide is conjugated to a linking component.

[0391] In certain embodiments, the linking component or spacer comprises a compound shown in Table 1.

Agents that Decrease the Expression of the SOD1 Gene or Protein

[0392] In some embodiments, the oligonucleotide agent decreases the expression of a SOD1 gene or protein. Administration of the oligonucleotide agent to a patient treats or delays the onset of ALS, such as familial or sporadic ALS or Leu Lou Gehrig's disease. In certain embodiments, the described oligonucleotide agent decreases the amount of a full-length SOD1 protein by, for example, deactivating/downregulating SOD transcription to decrease the amount of full-length SOD1 mRNA. In certain embodiments, full-length SOD1 protein is decreased in an amount sufficient to reduce the symptoms associated with an ALS. In certain embodiments, full-length SOD1 protein is decreased by at least 10% (e.g., at least 15%, at least 20%, at least 25%, at least 30%, at least 35%, at least 40%, at least 45%, at least 50%, at least 55%, at least 60%, at least 65%, at least 70%, at least 75%, at least 80%, at least 85%, at least 90%, or at least 95%).

[0393] The administration may be performed in any route of administration deemed useful. In some embodiments, the administration route is locally at the site of a central nervous system location. In some embodiments, the administration route is systemic.

[0394] In certain embodiments, a double-stranded targeting oligonucleotide of the oligonucleotide agent that decreases the expression of the SOD1 gene or protein is an siRNA. The SOD1 siRNA deactivates or downregulates the expression of an SOD1 gene, its mRNA transcript or SOD1 protein in a cell in which the SOD1 gene, its mRNA transcript or SOD1 protein is normally or over-expressed.

[0395] In typical embodiments, a first strand of the SOD1 siRNA comprises a segment that has at least 75% sequence identity or sequence complementarity to a 6-60 nucleotide fragments of a select target region of the SOD1 mRNA transcript thereby effecting deactivation or downregulation of expression of the SOD1 protein.

[0396] In the present application, the SOD1 siRNA comprises a sense nucleic acid fragment and an antisense nucleic acid fragment. The sense nucleic acid fragment and the antisense nucleic acid fragment comprise complementary regions capable of forming a double-stranded nucleic acid structure that knocks down expression of the SOD1 gene in a cell by the RNA interference mechanism. Sense nucleic acid fragments and antisense nucleic acid fragments of siRNAs may be present on two different nucleic acid strands or may be present on the same nucleic acid strand. When the sense and antisense nucleic acid fragments are present on two strands, at least one strand of the siRNA has a 3′ overhang of 0-6 nucleotides in length, preferably both strands have a 3′ overhang of 2 or 3 nucleotides in length, and preferably the nucleotides of the overhang are deoxythymine (dT). When a sense nucleic acid fragment and an antisense nucleic acid fragment of an siRNA are present on the same nucleic acid strand, preferably the siRNA is a single-stranded hairpin-structured nucleic acid molecule, wherein the complementary regions of the sense nucleic acid fragment and the antisense nucleic acid fragment form a double-stranded nucleic acid structure. In such an siRNA, the sense nucleic acid fragment and antisense nucleic acid fragment are 16-60 nucleotides in length, respectively and may be 16, 17, 18, 19, 20, 21, 22, 23, 24, 25, 26, 27, 28, 29, 30, 31, 32, 33, 34, 35, 36, 37, 38, 39, 40, 41, 42, 43, 44, 45, 46, 47, 48, 49, 50, 51, 52, 53, 54, 55, 56, 57, 58, 59, or 60 nucleotides.

[0397] In certain embodiments of the present application, the SOD1 siRNA comprises a sense nucleic acid strand and an antisense nucleic acid strand, the sense nucleic acid strand comprising at least one region that is complementary to at least one region on the antisense nucleic acid strand to form a double-stranded nucleic acid structure capable of deactivating expression of the SOD1 protein in a cell.

[0398] In certain embodiments of the present application, the sense nucleic acid strand and the antisense nucleic acid strand are located on two different nucleic acid strands. In certain embodiments of the present application, the sense nucleic acid fragment and the antisense nucleic acid fragment are located on the same nucleic acid strand, forming a hairpin single-stranded nucleic acid molecule, wherein the complementary regions of the sense nucleic acid fragment and the antisense nucleic acid fragment form a double-stranded nucleic acid structure.

[0399] In certain embodiments of the present application, at least one of the nucleic acid strands has a 3′overhang of 0 to 6 nucleotides in length. In certain embodiments of the present application, both of the nucleic acid strands have 3′overhangs of 2-3 nucleotides in length. In certain embodiments of the present application, the sense and antisense nucleic acid strands are 16 to 35 nucleotides in length, respectively.

[0400] In some embodiments, the oligonucleotide agent has a nucleotide sequence that is at least 60% (e.g., at least 65%, at least 70%, at least 75%, at least 80%, at least 85%, at least 90%, at least 95%, at least 97%, at least 99% or 100%) identical to the nucleotide sequences of DS17-01M3-AC1 (me14)-L9V3 whose antisense strand has a nucleotide sequence of SEQ ID NO: 933 that has complementarity with a fragment the of the ODV structured sense strand of SEQ ID NO: 928.

[0401] In some embodiments, the oligonucleotide agent has a nucleotide sequence that is at least 60% (e.g., at least 65%, at least 70%, at least 75%, at least 80%, at least 85%, at least 90%, at least 95%, at least 97%, at least 99% or 100%) identical to the nucleotide sequences of DS17-02M3-AC1 (me14)-L9V3 whose antisense strand has a nucleotide sequence of SEQ ID NO: 935 that has complementarity with a fragment of the ODV structured sense strand of SEQ ID NO: 928.

[0402] In some embodiments, the oligonucleotide agent has a nucleotide sequence that is at least 60% (e.g., at least 65%, at least 70%, at least 75%, at least 80%, at least 85%, at least 90%, at least 95%, at least 97%, at least 99% or 100%) identical to the nucleotide sequences of DS17-03M3-AC1 (me14)-L9V3 whose antisense strand has a nucleotide sequence of SEQ ID NO: 937 that has complementarity with a fragment of the ODV structured sense strand of SEQ ID NO 936.

[0403] In some embodiments, the oligonucleotide agent has a nucleotide sequence that is at least 60% (e.g., at least 65%, at least 70%, at least 75%, at least 80%, at least 85%, at least 90%, at least 95%, at least 97%, at least 99% or 100%) identical to the nucleotide sequences of DS17-04M3-AC1 (me14)-L9V3 whose antisense strand has a nucleotide sequence of SEQ ID NO: 939 that has complementarity with a fragment the of the ODV structured sense strand of SEQ ID NO: 938.

[0404] In some embodiments, the oligonucleotide agent has a nucleotide sequence that is at least 60% (e.g., at least 65%, at least 70%, at least 75%, at least 80%, at least 85%, at least 90%, at least 95%, at least 97%, at least 99% or 100%) identical to the nucleotide sequences of DS17-04M3v-AC1 (me14)-L9V3 whose antisense strand has a nucleotide sequence of SEQ ID NO. 950 that has complementarity with a fragment the of the ODV structured sense strand of SEQ ID NO: 938.

[0405] In some embodiments, the oligonucleotide agent has a nucleotide sequence that is at least 60% (e.g., at least 65%, at least 70%, at least 75%, at least 80%, at least 85%, at least 90%, at least 95%, at least 97%, at least 99% or 100%) identical to the nucleotide sequences of DS17-05M3-AC1 (me14)-L9V3 whose antisense strand has a nucleotide sequence of SEQ ID NO: 941 that has complementarity with a fragment the of the ODV structured sense strand of SEQ ID NO: 940.

[0406] In some embodiments, the oligonucleotide agent has a nucleotide sequence that is at least 60% (e.g., at least 65%, at least 70%, at least 75%, at least 80%, at least 85%, at least 90%, at least 95%, at least 97%, at least 99% or 100%) identical to the nucleotide sequences of DS17-29M2-AC1 (me14)-L9V3 whose antisense strand has a nucleotide sequence of SEQ ID NO: 47 that has complementarity with a fragment the of the ODV structured sense strand of SEQ ID NO: 942.

[0407] In some embodiments, the oligonucleotide agent has a nucleotide sequence that is at least 60% (e.g., at least 65%, at least 70%, at least 75%, at least 80%, at least 85%, at least 90%, at least 95%, at least 97%, at least 99% or 100%) identical to the nucleotide sequences of DS17-01M3v-AC1 (me14)-L9V3 whose antisense strand has a nucleotide sequence of SEQ ID NO: 47 that has complementarity with a fragment the of the ODV structured sense strand of SEQ ID NO: 932.

[0408] In some embodiments, the oligonucleotide agent has a nucleotide sequence that is at least 60% (e.g., at least 65%, at least 70%, at least 75%, at least 80%, at least 85%, at least 90%, at least 95%, at least 97%, at least 99% or 100%) identical to the nucleotide sequences of DS17-02M3v-AC1 (me14)-L9V3 whose antisense strand has a nucleotide sequence of SEQ ID NO. 943 that has complementarity with a fragment the of the ODV structured sense strand of SEQ ID NO: 934.

[0409] In some embodiments, the oligonucleotide agent has a nucleotide sequence that is at least 60% (e.g., at least 65%, at least 70%, at least 75%, at least 80%, at least 85%, at least 90%, at least 95%, at least 97%, at least 99% or 100%) identical to the nucleotide sequences of DS17-03M3v-AC1 (me14)-L9V3 whose antisense strand has a nucleotide sequence of SEQ ID NO: 944 that has complementarity with a fragment the of the ODV structured sense strand of SEQ ID NO: 936.

[0410] In some embodiments, the oligonucleotide agent has a nucleotide sequence that is at least 60% (e.g., at least 65%, at least 70%, at least 75%, at least 80%, at least 85%, at least 90%, at least 95%, at least 97%, at least 99% or 100%) identical to the nucleotide sequences of DS17-05M3v-AC1 (me14)-L9V3 whose antisense strand has a nucleotide sequence of SEQ ID NO: 951 that has complementarity with a fragment the of the ODV structured sense strand of SEQ ID NO: 940.

[0411] In some embodiments, the oligonucleotide agent has a nucleotide sequence that is at least 60% (e.g., at least 65%, at least 70%, at least 75%, at least 80%, at least 85%, at least 90%, at least 95%, at least 97%, at least 99% or 100%) identical to the nucleotide sequences of DS17-04M3-asSOD1-1-L9V3 whose antisense strand has a nucleotide sequence of SEQ ID NO. 939 that has complementarity with a fragment the of the ODV structured sense strand of SEQ ID NO: 952.

[0412] In some aspects, the present application provides an isolated SOD1 gene siRNA targeting site having any contiguous 16-35 nucleotide sequence on a select target region of the SOD1 gene (full length SOD1 sequence of SEQ ID NO 895). In certain embodiments, the select target region of the SOD1 gene comprises a nucleotide sequence that is at least 60% (e.g., at least 65%, at least 70%, at least 75%, at least 80%, at least 85%, at least 90%, at least 95%, at least 97%, at least 99% or 100%) identical to the nucleotide sequence selected from: at least a nucleotide sequence of SEQ ID NOs: 88-356.

[0413] In some embodiments, an siRNA includes a nucleotide sequence of a sense strand that is at least 60% (e.g., at least 65%, at least 70%, at least 75%, at least 80%, at least 85%, at least 90%, at least 95%, at least 97%, at least 99% or 100%) identical to the nucleotide sequence selected from: SEQ ID NOs: 357-624. In some embodiments, an siRNA includes a nucleotide sequence of an antisense strand that is at least 60% (e.g., at least 65%, at least 70%, at least 75%, at least 80%, at least 85%, at least 90%, at least 95%, at least 97%, at least 99% or 100%) identical to the nucleotide sequence selected from the group of: SEQ ID NOs 626-893.

[0414] In some embodiments, an siRNA includes a nucleotide sequence of a sense strand that is at least 600% (e.g., at least 65%, at least 70%, at least 75%, at least 80%, at least 85%, at least 90%, at least 95%, at least 97%, at least 99% or 100%) identical to the nucleotide sequence selected from: SEQ ID NOs 38, 40, 42, 44, 46, 50, 52, 54, 56, 58, 60, 62, and 64. In some embodiments, an siRNA includes a nucleotide sequence of an antisense strand that is at least 60% (e.g., at least 65%, at least 70%, at least 75%, at least 80%, at least 85%, at least 90%, at least 95%, at least 97%, at least 99% or 100%) identical to the nucleotide sequence selected from the group of: SEQ ID NOs: 39, 41, 43, 45, 47, 49, 51, 53 and 57.

[0415] In certain embodiments, the oligonucleotide agent has a nucleotide sequence that is at least 60% (e.g., at least 65%, at least 70%, at least 75%, at least 80%, at least 85%, at least 90%, at least 95%, at least 97%, at least 99% or 100%) identical to the nucleotide sequences of siHTT-AC2-S1L1 (SEQ ID NO: 28) and an antisense strand having a nucleotide sequence of SEQ ID NO: 27 that has partial complementarity with the sense strand of SEQ ID NO: 28.

[0416] In certain embodiments, the oligonucleotide agent has a nucleotide sequence that is at least 60% (e.g., at least 65%, at least 70%, at least 75%, at least 80%, at least 85%, at least 90%, at least 95%, at least 97%, at least 99° % or 100%) identical to the nucleotide sequences of siApp-8-S1V1 (SEQ ID NO: 30) and an antisense strand having a nucleotide sequence of SEQ ID NO: 31 that has partial complementarity with the sense strand of SEQ ID NO: 30.

[0417] In certain embodiments, the oligonucleotide agent that is at least 60% (e.g., at least 65%, at least 70%, at least 75%, at least 80%, at least 85%, at least 90%, at least 95%, at least 97%, at least 99% or 100%) identical to the nucleotide sequences of siSOD1-231-ESC (SEQ ID NO: 38) and an antisense siRNA strand having a nucleotide sequence of SEQ ID NO: 39 that has partial complementarity with the sense strand of SEQ ID NO: 38.

[0418] In certain embodiments, the oligonucleotide agent has a nucleotide sequence that is at least 60% (e.g., at least 65%, at least 70%, at least 75%, at least 80%, at least 85%, at least 90%, at least 95%, at least 97%, at least 99% or 100%) identical to the nucleotide sequences of siSOD1-231-TT (SEQ ID NO: 40) and an antisense siRNA strand having a nucleotide sequence of SEQ ID NO: 41 that has partial complementarity with the sense strand of SEQ ID NO: 40.

[0419] In certain embodiments, the oligonucleotide agent has a nucleotide sequence that is at least 60% (e.g., at least 65%, at least 70%, at least 75%, at least 80%, at least 85%, at least 90%, at least 95%, at least 97%, at least 99% or 100%) identical to the nucleotide sequences of (SEQ ID NO: 42) and an antisense siRNA strand having a nucleotide sequence of SEQ ID NO: 43 that has partial complementarity with the sense strand of SEQ ID NO: 42.

[0420] In certain embodiments, the oligonucleotide agent has a nucleotide sequence that is at least 60% (e.g., at least 65%, at least 70%, at least 75%, at least 80%, at least 85%, at least 90%, at least 95%, at least 97%, at least 99% or 100%) identical to the nucleotide sequences of (SEQ ID NO: 44) and an antisense siRNA strand having a nucleotide sequence of SEQ ID NO: 45 that has partial complementarity with the sense strand of SEQ ID NO: 44.

[0421] In certain embodiments, the oligonucleotide agent has a nucleotide sequence that is at least 60% (e.g., at least 65%, at least 70%, at least 75%, at least 80%, at least 85%, at least 90%, at least 95%, at least 97%, at least 99% or 100%) identical to the nucleotide sequences of (SEQ ID NO: 46) and an antisense siRNA strand having a nucleotide sequence of SEQ ID NO: 47 that has partial complementarity with the sense strand of SEQ ID NO: 46.

[0422] In certain embodiments, the oligonucleotide has a nucleotide sequence that is at least 60% (e.g., at least 65%, at least 70%, at least 75%, at least 80%, at least 85%, at least 90%, at least 95%, at least 97%, at least 99% or 100%) identical to the nucleotide sequences of SEQ ID NO: 46 and an antisense siRNA strand having a nucleotide sequence of SEQ ID NO: 49 that has partial complementarity with the sense strand of SEQ ID NO: 46.

[0423] In certain embodiments, the oligonucleotide agent has a nucleotide sequence that is at least 60% (e.g., at least 65%, at least 70%, at least 75%, at least 80%, at least 85%, at least 90%, at least 95%, at least 97%, at least 990% or 100%) identical to the nucleotide sequences of (SEQ ID NO: 50) and an antisense strand having a nucleotide sequence of SEQ ID NO: 51 that has partial complementarity with the sense strand of SEQ ID NO: 50.

[0424] In certain embodiments, the oligonucleotide agent has a nucleotide sequence that is at least 60% (e.g., at least 65%, at least 70%, at least 75%, at least 80%, at least 85%, at least 90%, at least 95%, at least 97%, at least 99% or 100%) identical to the nucleotide sequences of (SEQ ID NO: 52) and an antisense siRNA strand having a nucleotide sequence of SEQ ID NO: 53 that has partial complementarity with the sense strand of SEQ ID NO: 52.

[0425] In certain embodiments, the oligonucleotide agent has a nucleotide sequence that is at least 60% (e.g., at least 65%, at least 70%, at least 75%, at least 80%, at least 85%, at least 90%, at least 95%, at least 97%, at least 99% or 100%) identical to the nucleotide sequences of SEQ ID NO: 54 and an antisense siRNA strand having a nucleotide sequence of SEQ ID NO: 47 that has partial complementarity with the sense strand of SEQ ID NO: 54.

[0426] In certain embodiments, the oligonucleotide agent has a nucleotide sequence that is at least 60% (e.g., at least 65%, at least 70%, at least 75%, at least 80%, at least 85%, at least 90%, at least 95%, at least 97%, at least 99% or 100%) identical to the nucleotide sequences of SEQ ID NO: 56 and an antisense siRNA strand having a nucleotide sequence of SEQ ID NO: 57 that has partial complementarity with the sense strand of SEQ ID NO: 56.

[0427] In certain embodiments, the oligonucleotide agent has a nucleotide sequence that is at least 60% (e.g., at least 65%, at least 70%, at least 75%, at least 80%, at least 85%, at least 90%, at least 95%, at least 97%, at least 99% or 100%) identical to the nucleotide sequences of siSOD1M2-AC2(N22)-S1V3v-Qu5 (SEQ ID NO: 58) and an antisense siRNA strand having a nucleotide sequence of SEQ ID NO: 57 that has partial complementarity with the sense strand of SEQ ID NO: 58.

[0428] In certain embodiments, the oligonucleotide agent has a nucleotide sequence that is at least 60% (e.g., at least 65%, at least 70%, at least 75%, at least 80%, at least 85%, at least 90%, at least 95%, at least 97%, at least 99% or 100%) identical to the nucleotide sequences of siSOD1M2-AC2(N15)-S1V3v-Qu5 (SEQ ID NO: 60) and an antisense siRNA strand having a nucleotide sequence of SEQ ID NO: 57 that has partial complementarity with the sense strand of SEQ ID NO: 60.

[0429] In certain embodiments, the oligonucleotide agent has a nucleotide sequence that is at least 60% (e.g., at least 65%, at least 70%, at least 75%, at least 80%, at least 85%, at least 90%, at least 95%, at least 97%, at least 99% or 100%) identical to the nucleotide sequences of siSOD1M2-AC2(N12)-S1V3v-Qu5 (SEQ ID NO: 62) and an antisense siRNA strand having a nucleotide sequence of SEQ ID NO: 57 that has partial complementarity with the sense strand of SEQ ID NO: 62.

[0430] In certain embodiments, the oligonucleotide agent has a nucleotide sequence that is at least 60% (e.g., at least 65%, at least 70%, at least 75%, at least 80%, at least 85%, at least 90%, at least 95%, at least 97%, at least 99% or 100%) identical to the nucleotide sequences of siSOD1M2-AC2(N6)-S1V3v-Qu5 (SEQ ID NO 64) and an antisense siRNA strand having a nucleotide sequence of SEQ ID NO: 57 that has partial complementarity with the sense strand of SEQ ID NO: 64.

[0431] In certain embodiments, the oligonucleotide agent has a nucleotide sequence that is at least 60% (e.g., at least 65%, at least 70%, at least 75%, at least 80%, at least 85%, at least 90%, at least 95%, at least 97%, at least 99% or 100%) identical to SEQ ID NOs: 1196-1298, and an antisense siRNA strand having a nucleotide sequence of SEQ ID NO: 57 that has partial complementarity with the sense strand of SEQ ID NOs:1196-1298.

[0432] In addition, to facilitate entry of the siRNA into a cell, chemical conjugation groups other than the ACO disclosure herein may be introduced at the ends of the sense or antisense strands of the siRNA on the basis of the above modifications to facilitate action through a cell membrane composed of lipid bilayers and mRNA regions within the nuclear membrane and nucleus.

[0433] In some embodiments, siRNAs disclosed in the present application are covalently attached to one or more conjugate groups. In some embodiments, conjugate groups modify one or more properties of the attached oligonucleotide, including but not limited to pharmacodynamics, pharmacokinetics, stability, binding, absorption, tissue distribution, cellular distribution, cellular uptake, charge and clearance. In some embodiments, conjugate groups impart a new property on the attached oligonucleotide, e.g., fluorophores or reporter groups that enable detection of the oligonucleotide. Certain conjugate groups and conjugate moieties have been described previously, for example cholesterol moiety (Letsinger et al., Proc. Natl. Acad. Sci. USA, 1989, 86, 6553-6556), cholic acid (Manoharan et al., Bioorg. Med. Chem. Lett., 1994, 4, 1053-1060), a thioether, e.g., hexyl-S-tritylthiol (Manoharan et al., Ann. N.Y. Acad. Sci., 1992, 660, 306-309; Manoharan et al., Bioorg. Med. Chem. Lett., 1993, 3, 2765-2770), a thiocholesterol (Oberhauser et al., Nucl. Acids Res., 1992, 20, 533-538), an aliphatic chain, e.g., do-decan-diol or undecyl residues (Saison-Behmoaras et al., EMBO 1, 1991, 10, 1111-1118, Kabanov et al., FEBS Lett., 1990, 259, 327-330, Svinarchuk et al., Biochimie, 1993, 75, 49-54), a phospholipid, e.g., di-hexadecyl-rac-glycerol or triethyl-ammonium 1,2-di-O-hexadecyl-rac-glycero-3-H-phosphonate (Manoharan et al., Tetrahedron Lett., 1995, 36, 3651-3654; Shea et al., Nucl. Acids Res., 1990, 18, 3777-3783), a polyamine or a polyethylene glycol chain (Manoharan et al., Nucleosides & Nucleotides, 1995, 14, 969-973), or adamantane acetic acid a palmityl moiety (Mishra et al., Biochim. Biophys. Acta, 1995, 1264, 229-237), an octadecylamine or hexylamino-carbonyl-oxycholesterol moiety (Crooke et al., J. Pharmacol. Exp. Ther., 1996, 277, 923-937), a tocopherol group (Nishina et al., Molecular Therapy Nucleic Acids. 2015, 4, e220; and Nishina et al., Molecular T1herapy. 2008, 16, 734-740), or a GalNAc cluster (e.g., WO2014/179620).

[0434] In some embodiments, the siRNA of the present application relates to the sense strand or the antisense strand of the siRNA that is conjugated to one or more conjugation groups selected from: intercalators, reporter molecules, polyamines, polyamides, peptides, carbohydrates, vitamin moieties, polyethylene glycols, thioethers, polyethers, cholesterols, thiocholesterols, cholic acid moieties, folate, lipids, phospholipids, biotin, phenazine, phenanthridine, anthraquinone, adamantane, acridine, fluoresceins, rhodamines, coumarins, fluorophores, and dyes.

[0435] In some embodiments, a conjugate group comprises an active drug substance, for example, aspirin, warfarin, phenylbutazone, ibuprofen, suprofen, fen-bufen, ketoprofen, (S)-(+)-pranoprofen, carprofen, dansylsarcosine, 2,3,5-triiodobenzoic acid, tingolimod, flufenamic acid, folinic acid, a benzothiadiazide, chlorothiazide, a diazepine, indo-methicin, a barbiturate, a cephalosporin, a sulfa drug, an antidiabetic, an antibacterial or an antibiotic.

[0436] In some embodiments, the siRNA of the present application is conjugated to one or more conjugation groups selected from: a lipid, a fatty acid, a fluorophore, a ligand, a saccharide, a peptide, and an antibody.

[0437] In some embodiments, the siRNA of the present application relates to the sense strand or the antisense strand of the siRNA that is conjugated to one or more conjugation groups selected from a cell-penetrating peptide, polyethylene glycol, an alkaloid, a tryptamine, a benzimidazole, a quinolone, an amino acid, a cholesterol, glucose and N-acetylgalactosamine.

[0438] In some embodiments, the siRNA conjugated to one or more conjugation groups disclosed in the embodiments is directly contacted, transferred, delivered or administrated to a cell or a subject.

Oligonucleotide Agents that Increase the Expression of the SMN2 Gene or SMN12 Protein

[0439] In some embodiments, the oligonucleotide agent including the double-stranded targeting oligonucleotide and the non-targeting single-stranded oligonucleotide, e.g., an ACO, increases the expression of an SMN2 gene or protein. Administration of oligonucleotide agent to a patient treats or delays the onset of an SMN-deficiency-related condition, such as spinal muscular atrophy (SMA). In certain embodiments, the described oligonucleotide agent increases the amount of a full-length SMN protein by, for example, activating/up-regulating SMN2 transcription in conjunction with modulating splicing for exon 7 inclusion to increase the amount of full-length SMN2 mRNA. In certain embodiments, full-length SMN protein is increased in an amount sufficient to reduce the symptoms associated with an SMN-deficiency-related condition. In certain embodiments, full-length SMN protein is increased by at least 10% (e.g., at least 15%, at least 20%, at least 25%, at least 30%, at least 35%, at least 40%, at least 45%, at least 50%, at least 55%, at least 60%, at least 65%, at least 70%, at least 75%, at least 80%, at least 85%, at least 90%, or at least 95%).

[0440] The administration may be performed in any route of administration deemed useful. In some embodiments, the administration route is locally at the site of a central nervous system location. In some embodiments, the administration route is systemic.

[0441] In certain embodiments, double-stranded targeting oligonucleotide of the oligonucleotide agent that increases the expression of the SMN2 gene or protein is an saRNA. The SMN2 saRNA activates or upregulates the expression of an SMN2 gene in a cell in which the SMN2 gene is normally, insufficiently, or incorrectly expressed.

[0442] In typical embodiments, a first strand of the SMN2 saRNA comprises a segment that has at least 75% sequence identity or sequence complementarity to a 16-35 nucleotide fragment of the promoter region of the SMN2 gene thereby effecting activation or upregulation of expression of the gene.

[0443] In certain embodiments of the present application, the SMN2 saRNA comprises a sense nucleic acid strand and an antisense nucleic acid strand, the sense nucleic acid strand comprising at least one region that is complementary to at least one region on the antisense nucleic acid strand to form a double-stranded nucleic acid structure capable of activating expression of the SMN2 gene in a cell.

[0444] In certain embodiments, the oligonucleotide agent has a nucleotide sequence that is at least 60% (e.g., at least 65%, at least 70%, at least 75%, at least 80%, at least 85%, at least 90%, at least 95%, at least 97%, at least 99% or 100%) identical to any one of the saRNA sense strand sequences SEQ ID NOs: 66, 68, 70, 72, 74, 76, 78, 80, 82, 84, and 86, and an antisense saRNA strand having a nucleotide sequence selected from SEQ ID NO: 67, that has partial complementarity with the sense strand SEQ ID NOs: 66, 68, 70, 72, 74, 76, 78, 80, 82, 84, and 86, respectively.

[0445] In certain embodiments, the oligonucleotide agent has a nucleotide sequence that is at least 60% (e.g., at least 65%, at least 70%, at least 75%, at least 80%, at least 85%, at least 90%, at least 95%, at least 97%, at least 99% or 100%) identical to any one of the saRNA sense strand sequence of SEQ ID NO: 66, and an antisense saRNA strand having a nucleotide sequence selected from SEQ ID NO: 67, that has partial complementarity with the sense strand selected from SEQ ID NO: 66.¶

[0446] In certain embodiments, the oligonucleotide agent has a nucleotide sequence that is at least 60% (e.g., at least 65%, at least 70%, at least 75%, at least 80%, at least 85%, at least 90%, at least 95%, at least 97%, at least 99% or 100%) identical to the nucleotide sequences of R6-04M1-AC2(16)-S1L1V3v (SEQ ID NO: 70) and an antisense siRNA strand having a nucleotide sequence of SEQ ID NO: 67 that has partial complementarity with the sense strand of SEQ ID NO: 70.¶

[0447] In certain embodiments, the oligonucleotide agent has a nucleotide sequence that is at least 60% (e.g., at least 65%, at least 70%, at least 75%, at least 80%, at least 85%, at least 90%, at least 95%, at least 97%, at least 99% or 100%) identical to the nucleotide sequences of R6-04M1-AC2(15)-S1L1V3v (SEQ ID NO: 72) and an antisense siRNA strand having a nucleotide sequence of SEQ ID NO: 67 that has partial complementarity with the sense strand of SEQ ID NO: 72.¶

[0448] In certain embodiments, the oligonucleotide agent has a nucleotide sequence that is at least 60% (e.g., at least 65%, at least 70%, at least 75%, at least 80%, at least 85%, at least 90%, at least 95%, at least 97%, at least 99% or 100%) identical to the nucleotide sequences of R6-04M1-AC2(14)-S1L1V3v (SEQ ID NO: 74) and an antisense siRNA strand having a nucleotide sequence of SEQ ID NO: 67 that has partial complementarity with the sense strand of SEQ ID NO: 74.¶

[0449] In certain embodiments, the oligonucleotide agent has a nucleotide sequence that is at least 60% (e.g., at least 65%, at least 70%, at least 75%, at least 80%, at least 85%, at least 90%, at least 95%, at least 97%, at least 99% or 100%) identical to the nucleotide sequences of R6-04M1-AC2(13)-S1L1V3v (SEQ ID NO: 76) and an antisense siRNA strand having a nucleotide sequence of SEQ ID NO: 67 that has partial complementarity with the sense strand of SEQ ID NO: 76.¶

[0450] In certain embodiments, the oligonucleotide agent has a nucleotide sequence that is at least 60% (e.g., at least 65%, at least 70%, at least 75%, at least 80%, at least 85%, at least 90%, at least 95%, at least 97%, at least 99% or 100%) identical to the nucleotide sequences of R6-04M1-AC2(12)-S1L1V3v (SEQ ID NO: 78) and an antisense siRNA strand having a nucleotide sequence of SEQ ID NO: 67 that has partial complementarity with the sense strand of SEQ ID NO: 78.¶

[0451] In certain embodiments, the oligonucleotide agent has a nucleotide sequence that is at least 60% (e.g., at least 65%, at least 70%, at least 75%, at least 80%, at least 85%, at least 90%, at least 95%, at least 97%, at least 99% or 100%) identical to the nucleotide sequences of R6-04M1-AC2(11)-S1L1V3v (SEQ ID NO: 80) and an antisense siRNA strand having a nucleotide sequence of SEQ ID NO: 67 that has partial complementarity with the sense strand of SEQ ID NO: 80.¶

[0452] In certain embodiments, the oligonucleotide agent has a nucleotide sequence that is at least 60% (e.g., at least 65%, at least 70%, at least 75%, at least 80%, at least 85%, at least 90%, at least 95%, at least 97%, at least 99% or 100%) identical to the nucleotide sequences of R6-04M1-AC2(10)-S1L1V3v (SEQ ID NO: 82) and an antisense siRNA strand having a nucleotide sequence of SEQ ID NO: 67 that has partial complementarity with the sense strand of SEQ ID NO: 82.¶

[0453] In certain embodiments, the oligonucleotide agent has a nucleotide sequence that is at least 60% (e.g., at least 65%, at least 70%, at least 75%, at least 80%, at least 85%, at least 90%, at least 95%, at least 97%, at least 99% or 100%) identical to the nucleotide sequences of R6-04M1-AC2(9)-S1L1V3v (SEQ ID NO: 84) and an antisense siRNA strand having a nucleotide sequence of SEQ ID NO: 67 that has partial complementarity with the sense strand of SEQ ID NO: 84.

[0454] In certain embodiments, the oligonucleotide agent has a nucleotide sequence that is at least 60% (e.g., at least 65%, at least 70%, at least 75%, at least 80%, at least 85%, at least 90%, at least 95%, at least 97%, at least 99% or 100%) identical to the nucleotide sequences of R6-04M1-AC2(8)-S1L1V3v (SEQ ID NO: 86) and an antisense siRNA strand having a nucleotide sequence of SEQ ID NO: 67 that has partial complementarity with the sense strand of SEQ ID NO: 86.

### Methods of Modulating Gene Expression

[0455] In some aspects, oligonucleotide agents of the present application can be useful for therapeutic approaches to treating diseases such as spinal muscular atrophy (SMA) or ALS.

[0456] By non-limiting embodiments, the present application provides a method of decreasing or silencing the levels of mRNA transcript of a SOD1 gene or SOD1 protein in a cell or individual, comprising administering to a subject a pharmaceutical composition disclosed herein.

[0457] In some embodiments, the present application relates to a method for treating or delaying the onset or progression of Amyotrophic lateral sclerosis (ALS) in a subject, the method comprising: administering to the subject a pharmaceutical composition disclosed herein. In some embodiments, the subject has sporadic ALS (sALS). In some embodiments, the subject has familial ALS (fALS) In some embodiments, the pharmaceutical composition decreases or silences the levels of mRNA transcript of a SOD1 gene or SOD1 protein in a cell or individual.

[0458] In some embodiments, the ACO of the oligonucleotide agent improves the stability, bioavailability, biodistribution, and/or cellular uptake of the siRNA as compared to an oligonucleotide agent without the ACO. In some embodiments, the ACO of the oligonucleotide agent increases the biodistribution of siRNA within one or more target tissues as compared to an oligonucleotide agent without the ACO. In some embodiments, the ACO of the oligonucleotide agent increases the biodistribution of siRNA within two or more target tissues as compared to an oligonucleotide agent without the ACO.

[0459] In some embodiments, the one or more target tissues is selected from tissues of brain, spinal cord, muscle, spleen, lung, heart, liver, bladder, and kidney. In some embodiments, the one or more target tissues is selected from the group of: prefrontal cortex, cerebellum, and rest of brain; cervical, thoracic and lumbar in spinal cord; heart, forelimb, hindlimb, nape, and gluteus.

[0460] In some embodiments, the oligonucleotide agent of the present application achieves a decrease in full-length SOD1 protein that is less than the amount achieved by administration of the same amount of double stranded oligonucleotide such as a siRNA substance without an ODV structure used individually, with higher potency, reduced toxicity, or unwanted side effects. In some embodiments, the oligonucleotide agent of the present application achieves a decrease in full-length SOD1 protein that is less than the additive effect of treatment with the same amount of the double-stranded targeting oligonucleotide used individually.

[0461] Specifically, the oligonucleotide agent of the present application inhibits/down-regulates the SOD1 mRNA transcript by at least 10% (e.g., at least 20%, at least 30%, at least 40%, at least 50%, at least 60%, at least 70%, at least 80%, at least 90%, at least 95%, at least 96%, at least 97%, at least 98%, at least 99%, or about 100% as compared to baseline SOD1 mRNA transcript). In some embodiments, upon administering the oligonucleotide agent disclosed in the embodiments, e.g., to a cell or a subject, the SOD1 mRNA transcript is inhibited/downregulated by at least 50%, 60%, 70%, 77%, 79%, 81%, 84%, 85%, and 88% at 10 nM treatment compared to baseline SOD1 mRNA transcript in control group) in an in vitro cell line. In some embodiments, an oligonucleotide agent inhibits or downregulates the SOD1 mRNA transcript by about 90%.

[0462] In some embodiments, the expression of SOD1 gene is inhibited/downregulated by administering the oligonucleotide agent disclosed in the embodiments to a cell at a concentration of at least 0.01 nM, e.g., 0.02 nM, 0.05 nM, 0.08 nM, 0.1 nM, 0.2 nM, 0.3 nM, 0.4 nM, 0.5 nM, 0.6 nM, 0.8 nM, 1 nM, 5 nM, 10 nM, 25 nM, 50 nM, 75 nM, 100 nM, or 150 nM. In some embodiments, the SOD1 gene coded protein (SOD1 protein) is inhibited/downregulated by administering the oligonucleotide agent disclosed in the embodiments, e.g., to a cell or a subject. The knockdown of the SOD1 protein by at least at least 10% (e.g., at least 20%, at least 30%, at least 40%, at least 50%, at least 60%, at least 70%, at least 80%, at least 90%, at least 95%, at least 96%, at least 97%, at least 98%, at least 99%, or about 100%, as compared to baseline expression of the SOD1 protein). In some embodiments, an oligonucleotide agent inhibits or downregulates the expression of the SOD1 protein by about 90%. In some embodiments, the SOD1 protein is inhibited/down-regulated by administering the oligonucleotide agent disclosed in the embodiments to a cell at a concentration of at least 0.01 nM, e.g., 0.02 nM, 0.05 nM, 0.08 nM, 0.1 nM, 0.2 nM, 0.3 nM, 0.4 nM, 0.5 nM, 0.6 nM, 0.8 nM, 1 nM, 2 nM, 3 nM, 4 nM, 5 nM, 10 nM, 25 nM, 50 nM, 75 nM, 100 nM, or 150 nM.

[0463] In some embodiments, the oligonucleotide agents disclosed in the embodiments have a dose-dependent knockdown activity in cells. In some embodiments, the oligonucleotide agents knockdown the SOD1 mRNA transcript in cells with a IC₅₀ of less than 10 nM, 5 nM, 4 nM, 3 nM, 2 nM, 1 nM, 0.8 nM, 0.6 nM, 0.5 nM, 0.4 nM, 0.3 nM, 0.2 nM, 0.1 nM, 0.08 nM, 0.06 nM, 0.04 nM, 0.02 nM, 0.01 nM, 0.008 nM, or 0.005 nM.

[0464] Another aspect of the present application relates to a method for preventing or treating a disorder or condition induced by over-expression of SOD1 protein, a SOD1 gene mutation, and/or high SOD1 mRNA levels in an individual comprising administering an effective amount of the siRNA, the oligonucleotide agent, or the composition comprising the oligonucleotide agent disclosed herein to the individual. In some embodiments, the effective amount of the siRNA disclosed herein can be a concentration ranging from 0.01 nM to 50 nM, e.g., 0.01 nM, 0.02 nM, 0.05 nM, 0.08 nM, 0.1 nM, 0.2 nM, 0.3 nM, 0.4 nM, 0.5 nM, 0.6 nM, 0.8 nM, 1 nM, 5 nM, 10 nM, 25 nM, 50 nM, 75 nM, 100 nM, or 150 nM. In some embodiments, the disorder or condition is ALS. In some embodiments, the individual is a mammal. In some embodiments, the individual is a human.

[0465] In any of the embodiments provided herein, such cells may be ex vivo, such as cell lines, and the like, or may be present in mammalian bodies, such as humans. In some embodiments, the human is a subject or individual suffering from a SOD1 protein related condition or ALS.

[0466] Another aspect of the application relates to the use of an oligonucleotide agent of the present application, a nucleic acid encoding two or more oligonucleotides of the oligonucleotide agent of the present application or a composition comprising the oligonucleotide agent of the present application or a nucleic acid encoding two or more oligonucleotides of the oligonucleotide agent of the present for the preparation of a medicament for the treatment or delaying the onset of an SMN-deficiency-related condition or ALS. The subject may be a mammal, such as a human. The subject may be an infant, a child or an adult.

[0467] In certain embodiments, the oligonucleotide agent of the present application achieves a decrease in full-length SOD1 protein that is less than the amount achieved by administration of the same amount of double stranded oligonucleotide substance used individually, with reduced toxicity or unwanted side effects. In certain embodiments, the oligonucleotide agent of the present application achieves a decrease in full-length SOD1 protein that is less than the additive effect of treatment with the same amount of the double stranded targeting oligonucleotide used individually.

[0468] In certain embodiments, the effect of the oligonucleotide agent of the present application achieves a greater clinical improvement compared to the effect of the same amount of either substance used individually. In certain embodiments, the effect of the oligonucleotide agent achieves a greater than additive clinical improvement compared to the effect of the same amount of double-stranded oligonucleotide used individually.

[0469] In any of the embodiments provided herein, such oligonucleotide agent, nucleic acids encoding the oligonucleotide agent of the present application, or compositions comprising such oligonucleotide agent or nucleic acids encoding oligonucleotide agent of the present application may be introduced directly into a cell, or may be produced intracellularly upon introduction of a nucleotide sequence encoding the oligonucleotide agent into a cell, preferably a mammalian cell, more preferably a human cell. Such cells may be ex vivo, such as cell lines, and the like, or may be present in mammalian bodies, such as humans. In some embodiments, the human is a patient or individual suffering from a SMN-deficiency-related condition or ALS. In certain embodiments, a nucleic acid encoding an oligonucleotide agent or a composition comprising the aforementioned oligonucleotide agent or a nucleic acid encoding an oligonucleotide agent of the application, in respective amounts sufficient to effect treatment of ALS.

[0470] In certain embodiments, the baseline measurement is obtained from a biological sample, as defined herein, obtained from an individual prior to administering the therapy described herein. In certain embodiments, the biological sample is peripheral blood mononuclear cells, blood plasma, serum, skin tissue, cerebrospinal fluid (CSF).

### Methods of Treating ALS

[0471] Aspects of the present methods include methods of treating ALS in a subject comprising administering to the subject a pharmaceutical composition comprising an oligonucleotide agent of the present application and a pharmaceutically acceptable carrier.

[0472] Among the known genes underlining ALS, SOD1 gene still remains a major cause of fALS and has been considered to be an important ALS drug target. The human SOD1 gene is located on chromosome 21q22.11 and located from base pair 33,031,935 to base pair 33,041,241 with a genomic size of 9307 bp. SOD1 gene codes for the monomeric SOD1 protein (153 amino acids, molecular weight 16 kDa), and also encodes for the detoxifying copper/zinc binding SOD1 enzyme, which has been found to be localized mainly in the cytosol, as well as in the nucleus, peroxisomes, and mitochondria. The first description of the ALS disease dates back to at least 1824 by Charles Bell, however, SOD1 as the first risk gene of ALS was discovered in 1993. When the first SOD1 transgenic mouse model (SOD1^{G13A}) was established in 1994, indicating that the research on ALS entered a new era. All these lines of evidence indicate that SOD1 mutants cause disease most probably via a gain-of-function, and reducing its levels may be beneficial. The excessive oxidation of wild-type SOD1 induces toxic conformational changes SOD1 silencing significantly attenuated astrocyte-mediated toxicity towards motor neurons. Therefore, silencing SOD1 expression is an important strategy for the treatment of ALS.

[0473] The present application provides an oligonucleotide agent with an efficient and effective oligonucleotide delivery vehicle. The agent comprising a double-stranded siRNA targeting oligonucleotide is observed to treat ALS by inhibiting the expression of SOD1 gene through the RNAi silencing mechanism. The present application provides SOD1 siRNAs with potent inhibitory effect, when covalently linked with an ODV (ACO), which was found by the inventors to be beneficial for use in the treatment of ALS.

[0474] In some embodiments, the subject has sporadic ALS (sALS). In some embodiments, the subject has familial ALS (fALS). In some embodiments, the subject with ALS has increased or abnormal SOD1 full length protein expression. In some embodiments, the double-stranded oligonucleotide of the oligonucleotide agent decreases or silences the expression of the SOD1 gene or SOD1 protein.

[0475] In certain embodiments, the ACO of the oligonucleotide agent improves the stability, bioavailability, biodistribution, and/or cellular uptake of the double-stranded oligonucleotide as compared to an oligonucleotide agent without the ACO. In some embodiments, the ACO of the oligonucleotide agent increases the biodistribution of double stranded oligonucleotide the within one or more target tissues as compared to an oligonucleotide agent without the ACO. In some embodiments, the ACO of the oligonucleotide agent increases the biodistribution of double stranded oligonucleotide the within two or more target tissues as compared to an oligonucleotide agent without the ACO.

[0476] In some embodiments, the one or more target tissues is selected from: prefrontal conex, cerebellum, muscle, liver, and kidney.

Cells Comprising siRNA

[0477] After contacting a cell, the oligonucleotide agent disclosed herein can effectively inhibit or downregulate the expression of SOD1 gene in a cell, for example downregulate the expression by at least 10% (e.g., as compared to baseline SOD1 transcription).

[0478] In some embodiments, the present application relates to a cell comprising the oligonucleotide agent disclosed herein. In some embodiments, the cell is a mammalian cell. In some embodiments, the cell is a human cell, such as a human cell in various tissues in organs including brain, spinal cord, muscle, spleen, lung, heart, liver, bladder, and kidney in some embodiments, the cell in target tissues is selected from the group of: prefrontal cortex, cerebellum, and rest of brain, cervical, thoracic and lumbar in spinal cord; heart, forelimb, hindlimb, nape, and gluteus muscles.

[0479] The cell disclosed herein may be in vitro, or ex vivo, such as a cell line or a cell strain, or may exist in a mammalian body, such as a human body. The human body disclosed herein is a subject suffering from a disease or symptom caused by a SOD1 gene mutation, abnormal SOD1 mRNA level, and/or overexpression of SOD1 protein in CNS.

[0480] In some embodiments, the cell is from a CNS tissue of a subject suffering from ALS. In some embodiments, the cell is from a subject suffering from ALS.

### Compositions of an Oligonucleotide Agent

[0481] Another aspect of the present application provides a pharmaceutical composition comprising the double stranded targeting oligonucleotide and the non-targeting single-stranded oligonucleotide as described in the present application.

[0482] The present application provides a composition or pharmaceutical composition capable of downregulated the level of SOD1 mRNA transcript by the mechanism of action (MoA) of RNA interference, comprising the oligonucleotide agent disclosed herein, to treat or prevent onset of a SOD1 related disease (particularly ALS).

[0483] In some embodiments, the present application relates to a composition or pharmaceutical composition comprising the siRNA of the present application. In some embodiments, the present application relates to a composition or pharmaceutical composition comprising the siRNA and the ACO as described herein. In some embodiments, the present application relates to a composition or pharmaceutical composition comprising the siRNA and the ACO covalently linked by a linking component as described herein.

[0484] In some embodiments, the pharmaceutical composition further comprises at least one pharmaceutically acceptable carrier. In one embodiment, the pharmaceutically acceptable carrier includes one or more of an aqueous carrier, liposome or LNP, polymer, micelle, colloid, metal nanoparticle, non-metallic nanoparticle, bioconjugates (e.g., GalNAc), and polypeptide. In one embodiment, the aqueous carrier may be, for example, RNase-free water, or RNase-free buffer. The composition may contain 1-150 nM, for example 1-100 nM, for example 1-50 nM, for example 1-20 nM, for example 10-100 nM, 10-50 nM, 20-50 nM, 20-100 nM, for example 50 nM of the aforementioned oligonucleotides or nucleic acid encoding the oligonucleotides according to the present application.

[0485] In some embodiments, the composition comprises 1-150 nM of the oligonucleotide agent of the present application.

[0486] Another aspect of the present application relates to the use of the oligonucleotide agent as described herein, a nucleic acid encoding the oligonucleotides agent as described herein, or a composition comprising such oligonucleotide agent or a nucleic acid encoding the oligonucleotide agent as described herein, where the double-stranded targeting oligonucleotide and the single-stranded oligonucleotide are covalently linked, for the preparation of one or more compositions for modulate the expression of one or more genes or proteins expressed by a cell.

[0487] Another embodiment provides pharmaceutical compositions or medicaments comprising the agents of the present application and a therapeutically inert carrier, diluent or pharmaceutically acceptable excipient, as well as methods of using the agents of the present application to prepare such compositions and medicaments.

[0488] For the oligonucleotide agent compositions of the present application, the delivery can be optionally through parenteral infusions including intrathecal, intramuscular, intravenous, intraarterial, intraperitoneal, intravesical, intracerebroventricular, intravitreal or subcutaneous administration; or through oral administration, intranasal administration, inhaled administration, vaginal administration, or rectal administration.

[0489] A typical formulation is prepared by mixing an agent of the present application and a carrier or excipient. Suitable carriers and excipients are well known to those skilled in the art and are described in detail in, e.g., Ansel H. C. et al., Ansel's Pharmaceutical Dosage Forms and Drug Delivery Systems (2004) Lippincott, Williams & Wilkins, Philadelphia; Gennaro A. R. et al., Remington: The Science and Practice of Pharmacy (2000) Lippincott, Williams & Wilkins, Philadelphia; and Rowe R. C, Handbook of Pharmaceutical Excipients (2005) Pharmaceutical Press, Chicago. The formulations may also include one or more buffers, stabilizing agents, surfactants, wetting agents, lubricating agents, emulsifiers, suspending agents, preservatives, antioxidants, opaquing agents, glidants, processing aids, colorants, sweeteners, perfuming agents, flavoring agents, diluents and other known additives to provide an elegant presentation of the drug (i.e., an agent of the present application or pharmaceutical composition thereof) or aid in the manufacturing of the pharmaceutical product (i.e., medicament).

[0490] Compositions of the present application are formulated, dosed, and administered in a fashion consistent with good medical practice. Factors for consideration in this context include the particular disorder being treated, the particular mammal being treated, the clinical condition of the individual patient, the cause of the disorder, the site of delivery of the agent, the method of administration, the scheduling of administration, and other factors known to medical practitioners.

[0491] In another aspect, the application provides use of the oligonucleotide agent, according to any one of the embodiments described herein, or a composition according to any one of the embodiments described herein, in the manufacture of a medicament for the treatment of gene or protein-related condition in an individual. The use according to certain embodiments, the condition can include a SMN-deficiency-related condition that comprises ALS. The use according to certain embodiments, the condition can include a SMN-deficiency-related condition that comprises a hereditary neuromuscular disease, preferably spinal muscular atrophy. In other embodiments, the condition can include an immune-related condition, such as cancer. Also provided is the use according to certain embodiments wherein the individual is a mammal, preferably a human.

### Dose Regiments and Route of Administration

[0492] Aspects of the present application relate to a pharmaceutical composition comprising the oligonucleotide agent of the present application. In some embodiments, the pharmaceutical composition comprising the oligonucleotide agent of the present application and a pharmaceutically acceptable carrier, a therapeutically inert carrier, diluent or pharmaceutically acceptable excipient. The pharmaceutical composition disclosed herein is to be developed into a medicament preventing or treating the SOD1 protein related condition or ALS.

[0493] Aspects of the present application also relate to methods of using the oligonucleotide agents of the present application to prepare such compositions.

[0494] Another aspect of the present application relates to use of the oligonucleotide agent of the present application in manufacturing the pharmaceutical composition disclosed herein.

[0495] Another aspect of the present application relates to use of the oligonucleotide agent, according to any one of the embodiments described herein, or a composition according to any one of the embodiments described herein, in the manufacture of a medicament for the prevention or treatment of gene or protein-related symptom induced by the over-expression of SOD1 protein, a SOD1 gene mutation, and/or high SOD1 protein levels in an individual.

[0496] For the use according to certain embodiments, the condition can include a SOD1 protein-mutation-related disorder or condition that comprises ALS. For the use according to certain embodiments, the symptom induced by over-expression of abnormal SOD1 protein is ALS. Also related is the use according to certain embodiments wherein the individual is a mammal, for example a human.

[0497] The dosage at which the oligonucleotide agents or compositions of the present application can be administered can vary within wide limits and will be fitted to the individual requirements in each case. In some embodiments, a first dose of a pharmaceutical composition according to the present application is administered when the subject is less than one week old, less than one month old, less than 3 months old, less than 6 months old, less than one-year-old, less than 2 years old, less than 15 years old, or older than 15 years old.

[0498] The single dose of the oligonucleotide agent can be a single dose ranging from 0.01 mg/kg to 1000 mg/kg for example, about 0.01, 0.02, 0.05, 0.1, 0.2, 0.5, 1, 2, 2.5, 5, 7.5, 10, 12.5, 15, 17.5, 20, 25, 30, 40, 50, 75, 100, 120, 150, 200, 250, 300, 400, 500, 750, or 1000 mg/kg. The doses described herein may contain two or more of any of the oligonucleotide agent sequences described herein.

[0499] In some embodiments, the proposed dose frequency is approximate. For example, in some embodiments if the proposed dose frequency is a dose at day 1 and a second dose at day 29, an ALS patient may receive a second dose 25, 26, 27, 28, 29, 30, 31, 32, 33, or 34 days after receipt of the first dose. In some embodiments, if the proposed dose frequency is a dose at day 1 and a second dose at day 15, an ALS patient may receive a second dose 10, 11, 12, 13, 14, 15, 16, 17, 18, 19, or 20 days after receipt of the first dose. In some embodiments, if the proposed dose frequency is a dose at day 1 and a second dose at day 85, an ALS patient may receive a second dose 80, 81, 82, 83, 84, 85, 86, 87, 88, 89, or 90 days after receipt of the first dose.

[0500] In some embodiments, the dose and/or the volume of the injection will be adjusted based on the subject's age, the subject's body weight, and/or other factors that may require adjustment of the parameters of the injection.

[0501] In some embodiments, pharmaceutical compositions comprise a co-solvent system. Certain of such co-solvent systems comprise, for example, benzyl alcohol, a nonpolar surfactant, a water-miscible organic polymer, and an aqueous phase. In some embodiments, such co-solvent systems are used for hydrophobic compounds. A non-limiting example of such a co-solvent system is the VPD co-solvent system, which is a solution of absolute ethanol comprising 3% w/v benzyl alcohol, 8% w/v of the nonpolar surfactant Polysorbate 80™ and 65% w/v polyethylene glycol 300. The proportions of such co-solvent systems may be varied considerably without significantly altering their solubility and toxicity characteristics. Furthermore, the identity of co-solvent components may be varied: for example, other surfactants may be used instead of Polysorbate 80™; the fraction size of polyethylene glycol may be varied; other biocompatible polymers may replace polyethylene glycol, e.g., polyvinyl pyrrolidone; and other sugars or polysaccharides may substitute for dextrose.

[0502] Examples of other compositions or components associated with the oligonucleotide agent, compositions, pharmaceutical compositions, and methods described herein include, but are not limited to: diluents, salts, buffers, chelating agents, preservatives, drying agents, antimicrobials, needles, syringes, packaging materials, tubes, bottles, flasks, beakers, and the like, for example, for using, modifying, assembling, storing, packaging, preparing, mixing, diluting, and/or preserving the components for a particular use. In embodiments where liquid forms of any of the components are used, the liquid form may be concentrated or ready to use.

[0503] In some embodiments, lipid moieties used in nucleic acid therapies can be applied in the present application for delivery of the oligonucleotide agent molecules disclosed herein. In such methods, the nucleic acid (e.g., one or more oligonucleotide agents described herein) is introduced into preformed liposomes or lipoplexes made of mixtures of cationic lipids and neutral lipids. In certain methods, oligonucleotide agent complexes with mono- or poly-cationic lipids are formed without the presence of a neutral lipid. In some embodiments, a lipid moiety is selected to increase distribution of a pharmaceutical agent to a particular cell or tissue. In some embodiments, a lipid moiety is selected to increase distribution of a pharmaceutical agent to fat tissue. In some embodiments, a lipid moiety is selected to increase distribution of a pharmaceutical agent to muscle tissue.

[0504] In some embodiments, pharmaceutical compositions comprise a delivery system. Examples of delivery systems include, but are not limited to, liposomes and emulsions. Certain delivery systems are useful for preparing certain pharmaceutical compositions including those comprising hydrophobic compounds. In some embodiments, certain organic solvents such as dimethylsulfoxide are used.

[0505] In some embodiments, pharmaceutical compositions comprise one or more tissue-specific delivery molecules designed to deliver the one or more pharmaceutical agents of the present application to specific tissues or cell types. For example, in some embodiments, pharmaceutical compositions include liposomes coated with a tissue-specific antibody.

[0506] In some embodiments, the oligonucleotide agent can be delivered or administered via a vector. Any vectors that may be used for gene delivery may be used. In some embodiments, a viral vector may be used. Non-limiting examples of viral vectors that may be used in the present application include, but are not limited to, human immunodeficiency virus; HSV, herpes simplex virus; MMSV, Moloney murine sarcoma virus; MSCV, murine stem cell virus; SFV, Semliki Forest virus, SIN, Sindbis virus, VEE, Venezuelan equine encephalitis virus; VSV, vesicular stomatitis virus; VV, vaccinia virus, AAV, adeno-associated virus; adenovirus; lentivirus; and retrovirus.

[0507] In some embodiments, the vector is a recombinant AAV vector AAV vectors are DNA viruses of relatively small size that can integrate, in a stable and site-specific manner, into the genome of the cells that they infect. They are able to infect a wide spectrum of cells without inducing any effects on cellular growth, morphology or differentiation, and they do not appear to be involved in human pathologies. The AAV genome has been cloned, sequenced and characterized. It encompasses approximately 4700 bases and contains an inverted terminal repeat (ITR) region of approximately 145 bases at each end, which serves as an origin of replication for the virus. The remainder of the genome is divided into two essential regions that carry the encapsulation functions: the left-hand part of the genome, that contains the rep gene involved in viral replication and expression of the viral genes, and the right-hand part of the genome, which contains the cap gene encoding the capsid proteins of the virus.

[0508] AAV vectors may be prepared using standard methods in the art. Adeno-associated viruses of any serotype are suitable (see, e.g., Blacklow, pp 165-174 of “Parvoviruses and Human Disease” J. R. Pattison, ed. (1988); Rose, Comprehensive Virology 3:1, 1974; P. Tattersall “The Evolution of Parvovirus Taxonomy” In Parvoviruses (J R Kerr, S F Cotmore, M E Bloom, R M Linden, C R Parrish, Eds.) p 5-14, Hudder Arnold, London, U K (2006); and D E Bowles, J E Rabinowitz, R J Samulski “The Genus Dependovirus” (J R Kerr, S F Cotmore, M E Bloom, R M Linden, C R Parrish, Eds.) p 15-23, Hudder Arnold, London, UK (2006), the disclosures of which are hereby incorporated by reference herein in their entireties). Methods for purifying for vectors may be found in, for example, U.S. Pat. Nos. 6,566,118, 6,989,264, and 6,995,006 and WO/1999/011764 titled “Methods for Generating High Titer Helper-free Preparation of Recombinant AAV Vectors”, the disclosures of which are herein incorporated by reference in their entirety Preparation of hybrid vectors is described in, for example, PCT Application No. PCT/US2005/027091, the disclosure of which is herein incorporated by reference in its entirety. The use of vectors derived from the AAVs for transferring genes in vitro and in vivo has been described (See e.g., International Patent Application Publication Nos: 91/18088 and WO 93/09239; U.S. Pat. Nos. 4,797,368, 6,596,535, and 5,139,941; and European Patent No: 0488528, all of which are herein incorporated by reference in their entirety). These publications describe various AAV-derived constructs in which the rep and/or cap genes are deleted and replaced by a gene of interest, and the use of these constructs for transferring the gene of interest in vitro (into cultured cells) or in vivo (directly into an organism). The replication defective recombinant AAVs according to the application can be prepared by co-transfecting a plasmid containing the nucleic acid sequence of interest flanked by two AAV inverted terminal repeat (ITR) regions, and a plasmid carrying the AAV encapsulation genes (rep and cap genes), into a cell line that is infected with a human helper virus (for example an adenovirus). The AAV recombinants that are produced are then purified by standard techniques.

[0509] In some embodiments, the vector(s) for use in the methods of the application are encapsulated into a virus particle (e.g., AAV virus particle including, but not limited to, AAV1, AAV2, AAV3, AAV4, AAV5, AAV6, AAV7, AAV8, AAV9, AAV10, AAV11, AAV12, AAV13, AAV14, AAV15, and AAV16). Accordingly, the application may include a recombinant virus particle (recombinant because it contains a recombinant polynucleotide) comprising any of the vectors described herein. Methods of producing such particles are known in the art and are described in U.S. Pat. No. 6,596,535.

[0510] In a particular embodiment, the oligonucleotide agent shows a greater than additive effect or synergy in the treatment, prevention, delaying progression and/or amelioration of diseases caused by the SOD1 gene, and additionally for the protection of cells implicated in the pathophysiology of the disease, particularly for the treatment, prevention, delaying progression and/or amelioration ALS.

[0511] In some embodiments, the delivery of the pharmaceutical composition comprising the oligonucleotide agent can be through parenteral infusions including intrathecal, intramuscular, intravenous, intraarterial, intraperitoneal, intravesical, intracerebrovenmricular, intravitreal or subcutaneous administration, or through oral administration, intranasal administration, inhaled administration, vaginal administration, or rectal administration.

[0512] In certain embodiments, where a dose of the oligonucleotide agent is administered as an intrathecal injection by lumbar puncture, the use of a smaller gauge needle may reduce or ameliorate one or more symptoms associated with a lumbar puncture procedure. In certain embodiments, symptoms associated with a lumbar puncture include, but are not limited to, post-lumbar puncture syndrome, headache, back pain, pyrexia, constipation, nausea, vomiting, and puncture site pain. In certain embodiments, use of a 24- or 25-gauge needle for the lumbar puncture reduces or ameliorates one or more post lumbar puncture symptoms. In certain embodiments, use of a 21-, 22-, 23-, 24- or 25-gauge needle for the lumbar puncture reduces or ameliorates post-lumbar puncture syndrome, headache, back pain, pyrexia, constipation, nausea, vomiting, and/or puncture site pain.

[0513] In certain embodiments, the dose and/or the volume of the injection will be adjusted based on the patient's age, the patient's CSF volume, or the patient's age and/or estimated CSF volume. (For example, see Matsuzawa J, Matsui M, Konishi T, Noguchi K, Gur R C, Bilker W, Miyawaki T. Age-related volumetric changes of brain gray and white matter in healthy infants and children. Cereb Cortex 2001 April; 11(4):335-342, which is hereby incorporated by reference in its entirety).

### Kits

[0514] In another aspect, any of the compositions described herein can be provided in one or more kits, optionally including instructions for use of the compositions. That is, the kit can include a description of use of an oligonucleotide agent or composition in any method described herein. A “kit,” as used herein, typically defines a package, assembly, or container (such as an insulated container) including one or more of the components or embodiments of the application, and/or other components associated with the application, for example, as previously described. Any of the antes or components of the kit may be provided in liquid form (e.g., in solution), or in solid form (e.g., a dried powder, frozen, etc.).

[0515] In some cases, the kit includes one or more components, which may be within the same or in two or more receptacles, and/or in any combination thereof. The receptacle is able to contain a liquid, and non-limiting examples include bottles, vials, jars, tubes, flasks, beakers, or the like. In some cases, the receptacle is spill-proof (when closed, liquid cannot exit the receptacle, regardless of orientation of the receptacle).

[0516] Examples of other compositions or components associated with the agents, compounds and methods described herein include, but are not limited to: diluents, salts, buffers, chelating agents, preservatives, drying agents, antimicrobials, needles, syringes, packaging materials, tubes, bottles, flasks, beakers, and the like, for example, for using, modifying, assembling, storing, packaging, preparing, mixing, diluting, and/or preserving the components for a particular use. In embodiments where liquid forms of any of the components are used, the liquid form may be concentrated or ready to use.

[0517] In additional embodiments, a kit can include instructions or instructions to a website or other source in any form that are provided for using the kit in connection with the components and/or methods described herein. For instance, the instructions may include instructions for the use, modification, mixing, diluting, preserving, assembly, storage, packaging, and/or preparation of the components and/or other components associated with the kit. In some cases, the instructions may also include instructions for the delivery of the components, for example, for shipping or storage at room temperature, sub-zero temperatures, cryogenic temperatures, etc. The instructions may be provided in any form that is useful to the user of the kit, such as written or oral (e.g., telephonic), digital, optical, visual (e.g., videotape, DVD, etc.) and/or electronic communications (including Internet or web-based communications), provided in any manner.

### Materials and Methods

### General Methods

[0518] Starting materials, reagents and solvents for organic synthesis were purchased from commercial sources and used as received unless stated otherwise. Purification of reactions products was performed by column chromatography using silica gel (200-300 mesh) and eluting with hexane/ethyl acetate, DCM/MeOH. Thin layer chromatography (TLC) was carried out using precoated silica Gel GF plates and visualized using KMnO4 stains. 1H-NMR spectra were recorded at 400 or 500 MHz (Varian) using CDCl3 with TMS. Mass spectra (MS) were recorded on LC/MS (Agilent Technologies 1260 Infinity II/6120 Quadrupole) and a time-of-flight mass spectrometer by ESI or matrix assisted laser desorption/ionization (MALDI).

### Oligonucleotide Synthesis

[0519] The oligonucleotides used were synthesized on a K&A DNA synthesizer (K&A Laborgeraete GbR, Schaafheim, Germany) by using solid phase technique. Briefly, during solid phase synthesis, phosphoramidite monomers including various linkers and conjugations (0.1M in acetonitrile or dichloromethane), were added sequentially onto a solid support to generate the desired full-length oligonucleotides. Each cycle of base addition consisted of four chemical reactions including detritylation, coupling, oxidation/thiolation and capping.

[0520] Detritylations were performed using 3% dichloroacetic acid (TCA) in DCM for 45 seconds and capping was done with a 16% N-methylimidazole in THF (CAP A) and THF:acetic anhydride:2,6-lutidine, (80:10:10, v/v/v) (CAP B) for 20 seconds. Sulfurizations were carried out with 0.1 M solution of xanthane hydride in pyridine/ACN (50:50, v/v) for 3 minutes. Oxidation was performed using 0.02 M iodine in THF:pyridine:water (70:20:10, v/v/v) for 60 seconds. Phosphoramidite coupling times were 360 s for all amidites.

[0521] Deprotection I (Nucleobase Deprotection): After completion of synthesis, the solid support was then transferred to a screw-cap microcentrifuge tube. For a 1 μM synthesis scale, a mixture of 33% methylamine in ethanol and 1 ml of ammonium hydroxide was added. The tube containing the solid support was then heated in an oven at 60° C. to 65° C. for 15 min and then allowed to cool to room temperature. The cleavage solution was collected and evaporated to dryness in a speedvac.

[0522] Deprotection II (Removal of 2′-TBDMS Group): The crude RNA oligonucleotide, still carrying the 2′-TBDMS groups, was dissolved in 0.1 ml of DMSO. After adding 1 ml of Triethylamine 3HF, the tube was capped, and the mixture was shaken vigorously to ensure complete dissolution. The bottle was heated in an oven at 60° C. to 65° C. for 3 to 3.5 hours. The tube was removed from the oven and cooled to room temperature. The solution containing the completely desilylated oligonucleotide was cooled on dry ice. 2 mls of ice-cold n-butanol (−20° C.) were carefully added in 0.5 ml portions to precipitate the oligonucleotide. The precipitate was filtered, washed with 1 ml ice-cold n-butanol, and subsequently dissolved in 2M TEAA (triethylammonium acetate). The crude oligonucleotides were then purified by exchange (IEX) HPLC using a source 15Q column. Purity of the fractions were analyzed by ion exchange (IEX) HPLC using Column DNA PacrM PA100. Following the generation of desalted purified single-strand solutions, a duplex was made by annealing two complimentary single-stranded oligonucleotides, which were subsequently lyophilized to powder.

### RP-HPLC and ESI-MS

[0523] Oligonucleotides were analyzed via reverse phase chromatography (i.e., RP-HPLC) (Waters XBridge oligonucleotide BEH C18 130A) using an acetonitrile grant and detection wavelength of 260 nm to qualify oligonucleotide purity. Electrospray ionization mass spectrometry (ESI-MS) was performed on desalted oligonucleotides resuspended in water/acetonitrile (50:50) containing 1% (vol/vol) triethylamine in negative ion mode.

### Cell Culture and Treatment

[0524] SMA patient-derived fibroblasts including GM03813 (SMA type I with 3 copies of SMN2 gene) and GM09677 (SMA type I with 3 copies of SMN2 gene) cells were obtained from Coriell Institute (Camden, NJ, USA). Both cultures were maintained at 37° C. with 5% CO₂ in modified MEM medium (Gibco, Thermo Fisher Scientific, Carlsbad, CA) supplemented with 15% bovine calf serum (Sigma-Aldrich), 1% NEAA (Gibco), and 1% penicillin/streptomycin (Gibco). Mouse neural stem cell line NSC-34 (BNCC341122, Beijing, China), HEK293A (Cobioer/CBP60436, Nanjing, China), and NSC-34 (BNCC341122, Beijing, China) cells were cultured at 37° C. with 5% C2 in DIMEM (Gibco) medium supplemented with 10% bovine calf serum (Sigma-Aldrich) and 1% penicillin/streptomycin (Gibco). Primary mouse hepatocytes (PMH) were isolated from the liver of Type I SMA (Smn1^{-/-}, SMN2^{+/+}) mice.

[0525] PMH cells were cultured at 37° C. with 5% C02 in modified DMEM medium (Gibco, Thermo Fisher Scientific, Carlsbad, CA) supplemented with 10% bovine calf serum (Sigma-Aldrich) and 1% penicillin/streptomycin (Gibco). SH-SY5Y cells (SCSP-5014, Chinese Academy of Sciences, Shanghai, China) were cultured at 5% CO₂ and 37° C. in MEM medium (Gibco, Thermo Fisher Scientific, Carlsbad, CA) supplemented with 10% bovine calf serum (Sigma-Aldrich) and 1% penicillin/streptomycin (Gibco). Neuro-2a (N-2a, BNCC338529, Beijing, China) were cultured at 5% CO₂ and 37° C. in EMEM medium (Gibco, Thermo Fisher Scientific, Carlsbad, CA) supplemented with 10% bovine calf serum (Sigma-Aldrich) and 1% penicillin/streptomycin (Gibco). Human glioma cell line T98G (ATCC) cells were cultured at 37° C. with 5% C02 in modified MEM medium (Gibco, Thermo Fisher Scientific, Carlsbad, CA) supplemented with 10% bovine calf serum (Sigma-Aldrich) and 1% penicillin/streptomycin (Gibco). Human cervical carcinoma cell HeLa (ATCC) cells were cultured at 37° C. with 5% C02 in modified RPMI 1640 medium (Gibco, Thermo Fisher Scientific, Carlsbad, CA) supplemented with 10% bovine calf serum (Sigma-Aldrich) and 1% penicillin/streptomycin (Gibco). The T98G, HeLa and HEK293A cells were seeded into 24-well plates at 10-10∝cells/well. siRNAs (note: the oligonucleotide agents in the present invention are simplified as “siRNA” in the description of materials, methods and examples hereafter) were individually transfected into the cells in each well at indicated concentration, or any other concentrations with 0.3 μL of RNAiMAX (Invitrogen, Carlsbad, CA) by following the reverse transfection protocol respectively, and the transfection duration was 24 hours. Other cells were seeded into 6- and 96-well plates at a final density of 1˜2×10⁵ and 6000 cells/well, respectively. Mock (blank control) was transfected in the absence of an oligonucleotide. dsCon2 duplex was transfected as a non-specific duplex control. All oligonucleotide sequences including RNA duplexes and ODV constructs used for cell treatments are listed in Table 2, Table 3 and Table 8. ACO sequence are listed in Table 7.

TABLE 2
Oligonucleotide strand sequences and duplex compositions

| | | Target | SEQ ID | | Size |
|---|---|---|---|---|---|
| Oligonucleotide name | Category | gene(s) | NO | Sequence (5′-3′) | (nt) |
| dsCon2 | Neg. Control dsRNA | | 24 | ACUACUGAGUGACAGUAGATT | 21 |
| | | | 25 | UCUACUGUCACUCAGUAGUTT | 21 |
| siHTT-S1V1 | siRNA | HTT | 26 | mU*mA*mUmCmAmGfUmAfAfAfGmAmGmAmUmU*mA*mA | 18 |
| | | | 27 | VPmU*fU*mAmAmUfCmUmCmUmUfUmAfCmUmGmAmUmA*mU*mA | 20 |
| siHTT-AC2-S1L1 | ODV- | HTT | 28 | mU*mA*mUmCmAmGfUmAfAfAfGmAmGmAmUmU*mA*mA-S18- | 36 |
| | siRNA | | | meU*meA*meG*meA*meC*meU*meA*meG*meA*meU*meC*meA*meU* | |
| | | | | meA*meU*meG*meA*meG | |
| | | | 27 | VPmU*fU*mAmAmUfCmUmCmUmUfUmAfCmUmGmAmUmA*mU*mA | 20 |
| siApp-8-S1V1v | siRNA | App | 30 | fC*mC*fCmAfGmAfAmUfCfAfGmCfUmAfCmGfGmAfA | 19 |
| | | | 31 | VPmU*fU*mCfCmGfUmAfGmCfUmGfAmUfUmCfUmGfGmG*fC*mU | 21 |
| siApp-8-AC2(N18)-S1L1V3v | ODV- | App | 32 | fC*mC*fCmAfGmAfAmUfCfAfGmCfUmAfCmGfGmAfA-S18- | 37 |
| | siRNA | | | U*A*G*A*C*U*A*G*A*U*C*A*U*A*U*G*A*G | |
| | | | 31 | VPmU*fU*mCfCmGfUmAfGmCfUmGfAmUfUmCfUmGfGmG*fC*mU | 21 |
| siApp-8-AC2(N15)-S1L1V3v | ODV- | App | 34 | fC*mC*fCmAfGmAfAmUfCfAfGmCfUmAfCmGfGmAfA-S18- | 34 |
| | siRNA | | | U*A*G*A*C*U*A*G*A*U*C*A*U*A*U | |
| | | | 31 | VPmU*fU*mCfCmGfUmAfGmCfUmGfAmUfUmCfUmGfGmG*fC*mU | 21 |
| siApp-8-AC2(N12)-S1L1V3v | ODV- | App | 36 | fC*mC*fCmAfGmAfAmUfCfAfGmCfUmAfCmGfGmAfA-S18- | 32 |
| | siRNA | | | U*A*G*A*C*U*A*G*A*U*C*A | |
| | | | 31 | VPmU*fU*mCfCmGfUmAfGmCfUmGfAmUfUmCfUmGfGmG*fC*mU | 21 |
| siSOD1-231-E | siRNA | SOD1 | 38 | fU*mG*fAmAfGmAfGmAfGfGfCmAfUmGfUmUfG*mG*fA | 19 |
| | | | 39 | mU*fC*mCfAmAfCmAfUmGfCmCfUmCfUmCfUmUfCmA*fU*mC | 21 |
| siSOD1-231-TT | siRNA | SOD1 | 40 | fU*mG*fAmAfGmAfGmAfGfGfCmAfUmGfUmUfG*mG*fA | 19 |
| | | | 41 | mU*fC*mCfAmAfCmAfUmGfCmCfUmCfUmCfUmUfCmA*T*T | 21 |
| siSOD1-231-M1 | siRNA | SOD1 | 42 | mG*fA*mAfGmAfGmAfGfGfCfAfUmGfUmUfG*mG*fA | 18 |
| | | | 43 | mU*fC*mCfAmAfCmAfUmGfCmCfUmC*fU*mC*fU*mU*fC*mA*fU | 20 |
| siSOD1-231-S2 | siRNA | SOD1 | 44 | fG*mA*fGmAfGmGfCmAfUmGfUmUfG*mG*fA | 15 |
| | | | 45 | mU*fC*mCfAmAfCmAfUmGfCmCfUmC*fU*mC*fU*mU*fC*mA*fU | 20 |
| siSOD1-388-E | siRNA | SOD1 | 46 | fG*mG*fUmGfGmAfAmAfUfGfAmAfGmAfAmAf*GmU*fA | 19 |
| | | | 47 | mU*fA*mCfUmUfUmCfUmUfCmAfUmUfUmCfCmAfCmC*fU*mU | 21 |
| siSOD1-388-TT | siRNA | SOD1 | 48 | fG*mG*fUmGfGmAfAmAfUfGfAmAfGmAfAmAf*GmU*fA | 19 |
| | | | 49 | mU*fA*mCfUmUfUmCfUmUfCmAfUmUfUmCfCmAfCmC*T*T | 21 |
| siSOD1-388-M1 | siRNA | SOD1 | 50 | mG*fU*mGfGmAfAmAfUfGfAfAfGmAfAmAfG*mU*fA | 18 |
| | | | 51 | mU*fA*mCfUmUfUmCfUmUfCmAfUmU*fU*mC*fC*mA*fC*mC*fU | 20 |
| siSOD1-388-S2 | siRNA | SOD1 | 52 | fG*mA*fAmAfUmGfAmAfGmAfAmAfG*mU*fA | 15 |
| | | | 53 | mU*fA*mCfUmUfUmCfUmUfCmAfUmU*fU*mC*fC*mA*fC*mC*fU | 20 |
| siSOD1M2-L1 | siRNA | SOD1 | 54 | fG*mG*fUmGfGmAfAmAfUfGfAmAfGmAfAmAf*GmU*fA-S18 | 19 |
| | | | 47 | mU*fA*mCfUmUfUmCfUmUfCmAfUmUfUmCfCmAfCmC*fU*mU | |
| siSOD1M2-S1V1v-Qu5 | siRNA | SOD1 | 56 | fG*mG*fUmGfGmAfAmAfUfGfAmAfGmAfAmAf*GmU*fA-Qu5 | 19 |
| | | | 57 | VPmU*fA*mCfUmUfUmCfUmUfCmAfUmUfUmCfCmAfCmC*fU*mU | 21 |
| siSOD1M2-AC2(N22)-S1V3v-Qu5 | ODV- | SOD1 | 58 | Qu5-fG*mG*fUmGfGmAfAmAfUfGfAmAfGmAfAmAfG*mU*fA-S18- | 41 |
| | siRNA | | | U*A*G*A*C*U*A*G*A*U*C*A*U*A*U*G*A*G*U*A*G*A | |
| | | | 57 | VPmU*fA*mCfUmUfUmCfUmUfCmAfUmUfUmCfCmAfCmC*fU*mU | 21 |
| siSOD1M2-AC2(N15)-S1V3v-Qu5 | ODV- | SOD1 | 60 | Qu5-fG*mG*fUmGfGmAfAmAfUfGfAmAfGmAfAmAfG*mU*fA-S18- | 34 |
| | siRNA | | | U*A*G*A*C*U*A*G*A*U*C*A*U*A*U | |
| | | | 57 | VPmU*fA*mCfUmUfUmCfUmUfCmAfUmUfUmCfCmAfCmC*fU*mU | 21 |
| siSOD1M2-AC2(N12)-S1V3v-Qu5 | ODV- | SOD1 | 62 | Qu5-fG*mG*fUmGfGmAfAmAfUfGfAmAfGmAfAmAfG*mU*fA-S18- | 31 |
| | siRNA | | | U*A*G*A*C*U*A*G*A*U*C*A | |
| | | | 57 | VPmU*fA*mCfUmUfUmCfUmUfCmAfUmUfUmCfCmAfCmC*fU*mU | 21 |
| siSOD1M2-AC2(N6)-S1V3v-Qu5 | ODV- | SOD1 | 64 | Qu5-fG*mG*fUmGfGmAfAmAfUfGfAmAfGmAfAmAfG*mU*fA-S18- | 25 |
| | siRNA | | | U*A*G*A*C*U | |
| | | | 57 | VPmU*fA*mCfUmUfUmCfUmUfCmAfUmUfUmCfCmAfCmC*fU*mU | 21 |
| R6-04(20)-S1V1v(CM-4) | saRNA | SMN2 | 66 | mG*fA*mCfGmAfGmGfCfCfUfAfAmGfCmAfA*mC*fA | 18 |
| | | | 67 | VPmU*fG*mUfUmGfCmUfUmAfGmGfCmC*fU*mC*fG*mU*fC*mU*fC | 20 |
| R6-04M1-AC2(18)-S1L1V3v | ODV- | SMN2 | 68 | mG*fA*mCfGmAfGmGfCfCfUfAfAmGfCmAfA*mC*fA-S18- | 36 |
| | saRNA | | | meU*meA*meG*meA*meC*meU*meA*meG*mcA*meU*meC*meA*meU* | |
| | | | | meA*meU*meG*meA*meG | |
| | | | 67 | VPmU*fG*mUfUmGfCmUfUmAfGmGfCmC*fU*mC*fG*mU*fC*mU*fC | 20 |
| R6-04M1-AC2(16)-S1L1V3v | ODV- | SMN2 | 70 | mG*fA*mCfGmAfGmGfCfCfUfAfAmGfCmAfA*mC*fA-S18- | 34 |
| | saRNA | | | meU*mcA*meG*meA*meC*meU*meA*meG*meA*meU*meC*meA*meU* | |
| | | | | meA*meU*meG | |
| | | | 67 | VPmU*fG*mUfUmGfCmUfUmAfGmGfCmC*fU*mC*fG*mU*fC*mU*fC | 20 |
| R6-04M1-AC2(15)-S1L1V3v | ODV- | SMN2 | 72 | mG*fA*mCfGmAfGmGfCfCfUfAfAmGfCmAfA*mC*fA-S18- | 33 |
| | saRNA | | | meU*meA*meG*meA*meC*mcU*meA*meG*meA*meU*meC*meA*meU* | |
| | | | | meA*meU | |
| | | | 67 | VPmU*fG*mUfUmGfCmUfUmAfGmGfCmC*fU*mC*fG*mU*fC*mU*fC | 20 |
| R6-04M1-AC2(14)-S1L1V3v | ODV- | SMN2 | 74 | mG*fA*mCfGmAfGmGfCfCfUfAfAmGfCmAfA*mC*fA-S18- | 32 |
| | saRNA | | | meU*meA*meG*meA*meC*meU*meA*meG*meA*meU*meC*meA*meU* | |
| | | | | meA | |
| | | | 67 | VPmU*fG*mUfUmGfCmUfUmAfGmGfCmC*FU*mC*FG*mU*fC*mU*fC | 20 |
| R6-04M1-AC2(13)-S1L1V3v | ODV- | SMN2 | 76 | mG*fA*mCfGmAfGmGfCfCfUfAfAmGfCmAfA*mC*fA-S18- | 31 |
| | saRNA | | | meU*meA*meG*meA*meC*meU*meA*meG*meA*meU*meC*meA*meU | |
| | | | 67 | VPmU*fG*mUfUmGfCmUfUmAfGmGfCmC*fU*mC*fG*mU*fC*mU*fC | 20 |
| R6-04M1-AC2(12)-S1L1V3v | ODV- | SMN2 | 78 | mG*fA*mCfGmAfGmGfCfCfUfAfAmGfCmAfA*mC*fA-S18- | 30 |
| | saRNA | | | meU*meA*meG*meA*meC*meU*meA*meG*meA*meU*meC*meA | |
| | | | 67 | VPmU*fG*mUfUmGfCmUfUmAfGmGfCmC*fU*mC*fG*mU*fC*mU*fC | 20 |
| R6-04M1-AC2(11)-S1L1V3v | ODV- | SMN2 | 80 | mG*fA*mCfGmAfGmGfCfCfUfAfAmGfCmAfA*mC*fA-S18- | 29 |
| | saRNA | | | meU*meA*meG*meA*meC*meU*meA*meG*meA*meU*meC | |
| | | | 67 | VPmU*fG*mUfUmGfCmUfUmAfGmGfCmC*fU*mC*fG*mU*fC*mU*fC | 20 |
| R6-04M1-AC2(10)-S1L1V3v | ODV- | SMN2 | 82 | mG*fA*mCfGmAfGmGfCfCfUfAfAmGfCmAfA*mC*fA-S18- | 28 |
| | saRNA | | | meU*meA*meG*meA*meC*meU*meA*meG*meA*meU | |
| | | | 67 | VPmU*fG*mUfUmGfCmUfUmAfGmGfCmC*fU*mC*fG*mU*fC*mU*fC | 20 |
| R6-04M1-AC2(9)-S1L1V3v | ODV- | SMN2 | 84 | mG*fA*mCfGmAfGmGfCfCfUfAfAmGfCmAfA*mC*fA-S18- | 27 |
| | saRNA | | | meU*meA*meG*meA*meC*meU*meA*meG*meA | |
| | | | 67 | VPmU*fG*mUfUmGfCmUfUmAfGmGfCmC*fU*mC*fG*mU*fC*mU*fC | 20 |
| R6-04M1-AC2(8)-S1L1V3v | ODV- | SMN2 | 86 | mG*fA*mCfGmAfGmGfCfCfUfAfAmGfCmAfA*mC*fA-S18- | 27 |
| | saRNA | | | meU*meA*meG*meA*meC*meU*meA*meG | |
| | | | 67 | VPmU*fG*mUfUmGfCmUfUmAfGmGfCmC*fU*mC*fG*mU*fC*mU*fC | 20 |

n.b.: upper case, RNA; *, phosphorothioate (PS) backbone modification; f, 2′-fluoro; m, 2′-O-methyl (2′-OMe); me, 2′-O-methoxyetbyl (2′MOE); VP, 5′-(E)-vinylphosphonate; C, 5′-methyl cytosine; U, 5′-methyl uracil, S18, spacer-18 linker; Qu5, Quasar570

TABLE 3
Oligonucleotide strand sequences and duplex compositions

| | SEQ | | SEQ | | SEQ | |
|---|---|---|---|---|---|---|
| | ID | Target sequence | ID | | ID | |
| siRNA | NO | (5′-3′) | NO | Sense (5′-3′) | NO | Antisense (5′-3′) |
| siSOD1-5 | 88 | cgacgaaggccgtgtgcgt | 357 | CGACGAAGGCCGUGUGCGUTT | 626 | ACGCACACGGCCUUCGUCGTT |
| siSOD1-8 | 89 | cgaaggccgtgtgcgtgct | 358 | CGAAGGCCGUGUGCGUGCUTT | 627 | AGCACGCACACGGCCUUCGTT |
| siSOD1-10 | 90 | aaggccgtgtgcgtgctga | 359 | AAGGCCGUGUGCGUGCUGATT | 628 | UCAGCACGCACACGGCCUUTT |
| siSOD1-11 | 91 | aggccgtgtgcgtgctgaa | 360 | AGGCCGUGUGCGUGCUGAATT | 629 | UUCAGCACGCACACGGCCUTT |
| siSOD1-17 | 92 | tgtgcgtgctgaagggcga | 361 | UGUGCGUGCUGAAGGGCGATT | 630 | UCGCCCUUCAGCACGCACATT |
| siSOD1-35 | 93 | acggcccagtgcagggcat | 362 | ACGGCCCAGUGCAGGGCAUTT | 631 | AUGCCCUGCACUGGGCCGUTT |
| siSOD1-37 | 94 | ggcccagtgcagggcatca | 363 | GGCCCAGUGCAGGGCAUCATT | 632 | UGAUGCCCUGCACUGGGCCTT |
| siSOD1-38 | 95 | gcccagtgcagggcatcat | 364 | GCCCAGUGCAGGGCAUCAUTT | 633 | AUGAUGCCCUGCACUGGGCTT |
| siSOD1-40 | 96 | ccagtgcagggcatcatca | 365 | CCAGUGCAGGGCAUCAUCATT | 634 | UGAUGAUGCCCUGCACUGGTT |
| siSOD1-41 | 97 | cagtgcagggcatcatcaa | 366 | CAGUGCAGGGCAUCAUCAATT | 635 | UUGAUGAUGCCCUGCACUGTT |
| siSOD1-42 | 98 | agtgcagggcatcatcaat | 367 | AGUGCAGGGCAUCAUCAAUTT | 636 | AUUGAUGAUGCCCUGCACUTT |
| siSOD1-43 | 99 | gtgcagggcatcatcaatt | 368 | GUGCAGGGCAUCAUCAAUUTT | 637 | AAUUGAUGAUGCCCUGCACTT |
| siSOD1-44 | 100 | tgcagggcatcatcaattt | 369 | UGCAGGGCAUCAUCAAUUUTT | 638 | AAAUUGAUGAUGCCCUGCATT |
| siSOD1-45 | 101 | gcagggcatcatcaatttc | 370 | GCAGGGCAUCAUCAAUUUCTT | 639 | GAAAUUGAUGAUGCCCUGCTT |
| siSOD1-46 | 102 | cagggcatcatcaatttcg | 371 | CAGGGCAUCAUCAAUUUCGTT | 640 | CGAAAUUGAUGAUGCCCUGTT |
| siSOD1-47 | 103 | agggcatcatcaatttcga | 372 | AGGGCAUCAUCAAUUUCGATT | 641 | UCGAAAUUGAUGAUGCCCUTT |
| siSOD1-50 | 104 | gcatcatcaatttcgagca | 373 | GCAUCAUCAAUUUCGAGCATT | 642 | UGCUCGAAAUUGAUGAUGCTT |
| siSOD1-51 | 105 | catcatcaatttcgagcag | 374 | CAUCAUCAAUUUCGAGCAGTT | 643 | CUGCUCGAAAUUGAUGAUGTT |
| siSOD1-52 | 106 | atcatcaatttcgagcaga | 375 | AUCAUCAAUUUCGAGCAGATT | 644 | UCUGCUCGAAAUUGAUGAUTT |
| siSOD1-53 | 107 | tcatcaatttcgagcagaa | 376 | UCAUCAAUUUCGAGCAGAATT | 645 | UUCUGCUCGAAAUUGAUGATT |
| siSOD1-56 | 108 | tcaatttcgagcagaagga | 377 | UCAAUUUCGAGCAGAAGGATT | 646 | UCCUUCUGCUCGAAAUUGATT |
| SISOD1-57 | 109 | caatttcgagcagaaggaa | 378 | CAAUUUCGAGCAGAAGGAATT | 647 | UUCCUUCUGCUCGAAAUUGTT |
| siSOD1-58 | 110 | aatttcgagcagaaggaaa | 379 | AAUUUCGAGCAGAAGGAAATT | 648 | UUUCCUUCUGCUCGAAAUUTT |
| siSOD1-59 | 111 | atttcgagcagaaggaaag | 380 | AUUUCGAGCAGAAGGAAAGTT | 649 | CUUUCCUUCUGCUCGAAAUTT |
| siSOD1-60 | 112 | tttcgagcagaaggaaagt | 381 | UUUCGAGCAGAAGGAAAGUTT | 650 | ACUUUCCUUCUGCUCGAAATT |
| siSOD1-61 | 113 | ttcgagcagaaggaaagta | 382 | UUCGAGCAGAAGGAAAGUATT | 651 | UACUUUCCUUCUGCUCGAATT |
| siSOD1-62 | 114 | tcgagcagaaggaaagtaa | 383 | UCGAGCAGAAGGAAAGUAATT | 652 | UUACUUUCCUUCUGCUCGATT |
| siSOD1-63 | 115 | cgagcagaaggaaagtaat | 384 | CGAGCAGAAGGAAAGUAAUTT | 653 | AUUACUUUCCUUCUGCUCGTT |
| siSOD1-64 | 116 | gagcagaaggaaagtaatg | 385 | GAGCAGAAGGAAAGUAAUGTT | 654 | CAUUACUUUCCUUCUGCUCTT |
| siSOD1-66 | 117 | gcagaaggaaagtaatgga | 386 | GCAGAAGGAAAGUAAUGGATT | 655 | UCCAUUACUUUCCUUCUGCTT |
| siSOD1-69 | 118 | gaaggaaagtaatggacca | 387 | GAAGGAAAGUAAUGGACCATT | 656 | UGGUCCAUUACUUUCCUUCTT |
| siSOD1-72 | 119 | ggaaagtaatggaccagtg | 388 | GGAAAGUAAUGGACCAGUGTT | 657 | CACUGGUCCAUUACUUUCCTT |
| siSOD1-73 | 120 | gaaagtaatggaccagtga | 389 | GAAAGUAAUGGACCAGUGATT | 658 | UCACUGGUCCAUUACUUUCTT |
| siSOD1-74 | 121 | aaagtaatggaccagtgaa | 390 | AAAGUAAUGGACCAGUGAATT | 659 | UUCACUGGUCCAUUACUUUTT |
| siSOD1-75 | 122 | aagtaatggaccagtgaag | 391 | AAGUAAUGGACCAGUGAAGTT | 660 | CUUCACUGGUCCAUUACUUTT |
| siSOD1-77 | 123 | gtaatggaccagtgaaggt | 392 | GUAAUGGACCAGUGAAGGUTT | 661 | ACCUUCACUGGUCCAUUACTT |
| siSOD1-79 | 124 | aatggaccagtgaaggtgt | 393 | AAUGGACCAGUGAAGGUGUTT | 662 | ACACCUUCACUGGUCCAUUTT |
| siSOD1-80 | 125 | atggaccagtgaaggtgtg | 394 | AUGGACCAGUGAAGGUGUGTT | 663 | CACACCUUCACUGGUCCAUTT |
| siSOD1-85 | 126 | ccagtgaaggtgtggggaa | 395 | CCAGUGAAGGUGUGGGGAATT | 664 | UUCCCCACACCUUCACUGGTT |
| siSOD1-88 | 127 | gtgaaggtgtggggaagca | 396 | GUGAAGGUGUGGGGAAGCATT | 665 | UGCUUCCCCACACCUUCACTT |
| siSOD1-89 | 128 | tgaaggtgtggggaagcat | 397 | UGAAGGUGUGGGGAAGCAUTT | 666 | AUGCUUCCCCACACCUUCATT |
| siSOD1-90 | 129 | gaaggtgtggggaagcatt | 398 | GAAGGUGUGGGGAAGCAUUTT | 667 | AAUGCUUCCCCACACCUUCTT |
| siSOD1-91 | 130 | aaggtgtggggaagcatta | 399 | AAGGUGUGGGGAAGCAUUATT | 668 | UAAUGCUUCCCCACACCUUTT |
| siSOD1-92 | 131 | aggtgtggggaagcattaa | 400 | AGGUGUGGGGAAGCAUUAATT | 669 | UUAAUGCUUCCCCACACCUTT |
| siSOD1-93 | 132 | ggtgtggggaagcattaaa | 401 | GGUGUGGGGAAGCAUUAAATT | 670 | UUUAAUGCUUCCCCACACCTT |
| siSOD1-94 | 133 | gtgtggggaagcattaaag | 402 | GUGUGGGGAAGCAUUAAAGTT | 671 | CUUUAAUGCUUCCCCACACTT |
| siSOD1-95 | 134 | tgtggggaagcattaaagg | 403 | UGUGGGGAAGCAUUAAAGGTT | 672 | CCUUUAAUGCUUCCCCACATT |
| siSOD1-96 | 135 | gtggggaagcattaaagga | 404 | GUGGGGAAGCAUUAAAGGATT | 673 | UCCUUUAAUGCUUCCCCACTT |
| siSOD1-98 | 136 | ggggaagcattaaaggact | 405 | GGGGAAGCAUUAAAGGACUTT | 674 | AGUCCUUUAAUGCUUCCCCTT |
| siSOD1-99 | 137 | gggaagcattaaaggactg | 406 | GGGAAGCAUUAAAGGACUGTT | 675 | CAGUCCUUUAAUGCUUCCCTT |
| siSOD1-100 | 138 | ggaagcattaaaggactga | 407 | GGAAGCAUUAAAGGACUGATT | 676 | UCAGUCCUUUAAUGCUUCCTT |
| siSOD1-102 | 139 | aagcattaaaggactgact | 408 | AAGCAUUAAAGGACUGACUTT | 677 | AGUCAGUCCUUUAAUGCUUTT |
| siSOD1-104 | 140 | gcattaaaggactgactga | 409 | GCAUUAAAGGACUGACUGATT | 678 | UCAGUCAGUCCUUUAAUGCTT |
| siSOD1-105 | 141 | cattaaaggactgactgaa | 410 | CAUUAAAGGACUGACUGAATT | 679 | UUCAGUCAGUCCUUUAAUGTT |
| siSOD1-106 | 142 | attaaaggactgactgaag | 411 | AUUAAAGGACUGACUGAAGTT | 680 | CUUCAGUCAGUCCUUUAAUTT |
| siSOD1-107 | 143 | ttaaaggactgactgaagg | 412 | UUAAAGGACUGACUGAAGGTT | 681 | CCUUCAGUCAGUCCUUUAATT |
| siSOD1-108 | 144 | taaaggactgactgaaggc | 413 | UAAAGGACUGACUGAAGGCTT | 682 | GCCUUCAGUCAGUCCUUUATT |
| siSOD1-114 | 145 | actgactgaaggcctgcat | 414 | ACUGACUGAAGGCCUGCAUTT | 683 | AUGCAGGCCUUCAGUCAGUTT |
| siSOD1-117 | 146 | gactgaaggcctgcatgga | 415 | GACUGAAGGCCUGCAUGGATT | 684 | UCCAUGCAGGCCUUCAGUCTT |
| siSOD1-118 | 147 | actgaaggcctgcatggat | 416 | ACUGAAGGCCUGCAUGGAUTT | 685 | AUCCAUGCAGGCCUUCAGUTT |
| siSOD1-119 | 148 | ctgaaggcctgcatggatt | 417 | CUGAAGGCCUGCAUGGAUUTT | 686 | AAUCCAUGCAGGCCUUCAGTT |
| siSOD1-120 | 149 | tgaaggcctgcatggattc | 418 | UGAAGGCCUGCAUGGAUUCTT | 687 | GAAUCCAUGCAGGCCUUCATT |
| siSOD1-122 | 150 | aaggcctgcatggattcca | 419 | AAGGCCUGCAUGGAUUCCATT | 688 | UGGAAUCCAUGCAGGCCUUTT |
| siSOD1-123 | 151 | aggcctgcatggattccat | 420 | AGGCCUGCAUGGAUUCCAUTT | 689 | AUGGAAUCCAUGCAGGCCUTT |
| siSOD1-125 | 152 | gcctgcatggattccatgt | 421 | GCCUGCAUGGAUUCCAUGUTT | 690 | ACAUGGAAUCCAUGCAGGCTT |
| siSOD1-126 | 153 | cctgcatggattccatgtt | 422 | CCUGCAUGGAUUCCAUGUUTT | 691 | AACAUGGAAUCCAUGCAGGTT |
| siSOD1-127 | 154 | ctgcatggattccatgttc | 423 | CUGCAUGGAUUCCAUGUUCTT | 692 | GAACAUGGAAUCCAUGCAGTT |
| siSOD1-128 | 155 | tgcatggattccatgttca | 424 | UGCAUGGAUUCCAUGUUCATT | 693 | UGAACAUGGAAUCCAUGCATT |
| siSOD1-129 | 156 | gcatggattccatgttcat | 425 | GCAUGGAUUCCAUGUUCAUTT | 694 | AUGAACAUGGAAUCCAUGCTT |
| siSOD1-131 | 157 | atggattccatgttcatga | 426 | AUGGAUUCCAUGUUCAUGATT | 695 | UCAUGAACAUGGAAUCCAUTT |
| siSOD1-132 | 158 | tggattccatgttcatgag | 427 | UGGAUUCCAUGUUCAUGAGTT | 696 | CUCAUGAACAUGGAAUCCATT |
| siSOD1-133 | 159 | ggattccatgttcatgagt | 428 | GGAUUCCAUGUUCAUGAGUTT | 697 | ACUCAUGAACAUGGAAUCCTT |
| siSOD1-134 | 160 | gattccatgttcatgagtt | 429 | GAUUCCAUGUUCAUGAGUUTT | 698 | AACUCAUGAACAUGGAAUCTT |
| siSOD1-137 | 161 | tccatgttcatgagtttgg | 430 | UCCAUGUUCAUGAGUUUGGTT | 699 | CCAAACUCAUGAACAUGGATT |
| siSOD1-138 | 162 | ccatgttcatgagtttgga | 431 | CCAUGUUCAUGAGUUUGGATT | 700 | UCCAAACUCAUGAACAUGGTT |
| siSOD1-140 | 163 | atgttcatgagtttggaga | 432 | AUGUUCAUGAGUUUGGAGATT | 701 | UCUCCAAACUCAUGAACAUTT |
| siSOD1-141 | 164 | tgttcatgagtttggagat | 433 | UGUUCAUGAGUUUGGAGAUTT | 702 | AUCUCCAAACUCAUGAACATT |
| siSOD1-142 | 165 | gttcatgagtttggagata | 434 | GUUCAUGAGUUUGGAGAUATT | 703 | UAUCUCCAAACUCAUGAACTT |
| siSOD1-148 | 166 | gagtttggagataatacag | 435 | GAGUUUGGAGAUAAUACAGTT | 704 | CUGUAUUAUCUCCAAACUCTT |
| siSOD1-150 | 167 | gtttggagataatacagca | 436 | GUUUGGAGAUAAUACAGCATT | 705 | UGCUGUAUUAUCUCCAAACTT |
| siSOD1-154 | 168 | ggagataatacagcaggct | 437 | GGAGAUAAUACAGCAGGCUTT | 706 | AGCCUGCUGUAUUAUCUCCTT |
| siSOD1-156 | 169 | agataatacagcaggctgt | 438 | AGAUAAUACAGCAGGCUGUTT | 707 | ACAGCCUGCUGUAUUAUCUTT |
| siSOD1-157 | 170 | gataatacagcaggctgta | 439 | GAUAAUACAGCAGGCUGUATT | 708 | UACAGCCUGCUGUAUUAUCTT |
| siSOD1-158 | 171 | ataatacagcaggctgtac | 440 | AUAAUACAGCAGGCUGUACTT | 709 | GUACAGCCUGCUGUAUUAUTT |
| siSOD1-159 | 172 | taatacagcaggctgtacc | 441 | UAAUACAGCAGGCUGUACCTT | 710 | GGUACAGCCUGCUGUAUUATT |
| siSOD1-160 | 173 | aatacagcaggctgtacca | 442 | AAUACAGCAGGCUGUACCATT | 711 | UGGUACAGCCUGCUGUAUUTT |
| siSOD1-162 | 174 | tacagcaggctgtaccagt | 443 | UACAGCAGGCUGUACCAGUTT | 712 | ACUGGUACAGCCUGCUGUATT |
| siSOD1-163 | 175 | acagcaggctgtaccagtg | 444 | ACAGCAGGCUGUACCAGUGTT | 713 | CACUGGUACAGCCUGCUGUTT |
| siSOD1-165 | 176 | agcaggctgtaccagtgca | 445 | AGCAGGCUGUACCAGUGCATT | 714 | UGCACUGGUACAGCCUGCUTT |
| siSOD1-171 | 177 | ctgtaccagtgcaggtcct | 446 | CUGUACCAGUGCAGGUCCUTT | 715 | AGGACCUGCACUGGUACAGTT |
| siSOD1-173 | 178 | gtaccagtgcaggtcctca | 447 | GUACCAGUGCAGGUCCUCATT | 716 | UGAGGACCUGCACUGGUACTT |
| siSOD1-175 | 179 | accagtgcaggtcctcact | 448 | ACCAGUGCAGGUCCUCACUTT | 717 | AGUGAGGACCUGCACUGGUTT |
| siSOD1-176 | 180 | ccagtgcaggtcctcactt | 449 | CCAGUGCAGGUCCUCACUUTT | 718 | AAGUGAGGACCUGCACUGGTT |
| siSOD1-177 | 181 | cagtgcaggtcctcacttt | 450 | CAGUGCAGGUCCUCACUUUTT | 719 | AAAGUGAGGACCUGCACUGTT |
| siSOD1-178 | 182 | agtgcaggtcctcacttta | 451 | AGUGCAGGUCCUCACUUUATT | 720 | UAAAGUGAGGACCUGCACUTT |
| siSOD1-179 | 183 | gtgcaggtcctcactttaa | 452 | GUGCAGGUCCUCACUUUAATT | 721 | UUAAAGUGAGGACCUGCACTT |
| siSOD1-180 | 184 | tgcaggtcctcactttaat | 453 | UGCAGGUCCUCACUUUAAUTT | 722 | AUUAAAGUGAGGACCUGCATT |
| siSOD1-181 | 185 | gcaggtcctcactttaatc | 454 | GCAGGUCCUCACUUUAAUCTT | 723 | GAUUAAAGUGAGGACCUGCTT |
| siSOD1-182 | 186 | caggtcctcactttaatcc | 455 | CAGGUCCUCACUUUAAUCCTT | 724 | GGAUUAAAGUGAGGACCUGTT |
| siSOD1-183 | 187 | aggtcctcactttaatcct | 456 | AGGUCCUCACUUUAAUCCUTT | 725 | AGGAUUAAAGUGAGGACCUTT |
| siSOD1-184 | 188 | ggtcctcactttaatcctc | 457 | GGUCCUCACUUUAAUCCUCTT | 726 | GAGGAUUAAAGUGAGGACCTT |
| siSOD1-185 | 189 | gtcctcactttaatcctct | 458 | GUCCUCACUUUAAUCCUCUTT | 727 | AGAGGAUUAAAGUGAGGACTT |
| siSOD1-186 | 190 | tcctcactttaatcctcta | 459 | UCCUCACUUUAAUCCUCUATT | 728 | UAGAGGAUUAAAGUGAGGATT |
| siSOD1-187 | 191 | cctcactttaatcctctat | 460 | CCUCACUUUAAUCCUCUAUTT | 729 | AUAGAGGAUUAAAGUGAGGTT |
| siSOD1-188 | 192 | ctcactttaatcctctatc | 461 | CUCACUUUAAUCCUCUAUCTT | 730 | GAUAGAGGAUUAAAGUGAGTT |
| siSOD1-189 | 193 | tcactttaatcctctatcc | 462 | UCACUUUAAUCCUCUAUCCTT | 731 | GGAUAGAGGAUUAAAGUGATT |
| siSOD1-190 | 194 | cactttaatcctctatcca | 463 | CACUUUAAUCCUCUAUCCATT | 732 | UGGAUAGAGGAUUAAAGUGTT |
| siSOD1-192 | 195 | ctttaatcctctatccaga | 464 | CUUUAAUCCUCUAUCCAGATT | 733 | UCUGGAUAGAGGAUUAAAGTT |
| siSOD1-196 | 196 | aatcctctatccagaaaac | 465 | AAUCCUCUAUCCAGAAAACTT | 734 | GUUUUCUGGAUAGAGGAUUTT |
| siSOD1-197 | 197 | atcctctatccagaaaaca | 466 | AUCCUCUAUCCAGAAAACATT | 735 | UGUUUUCUGGAUAGAGGAUTT |
| siSOD1-198 | 198 | tcctctatccagaaaacac | 467 | UCCUCUAUCCAGAAAACACTT | 736 | GUGUUUUCUGGAUAGAGGATT |
| siSOD1-201 | 199 | tctatccagaaaacacggt | 468 | UCUAUCCAGAAAACACGGUTT | 737 | ACCGUGUUUUCUGGAUAGATT |
| siSOD1-208 | 200 | agaaaacacggtgggccaa | 469 | AGAAAACACGGUGGGCCAATT | 738 | UUGGCCCACCGUGUUUUCUTT |
| siSOD1-209 | 201 | gaaaacacggtgggccaaa | 470 | GAAAACACGGUGGGCCAAATT | 739 | UUUGGCCCACCGUGUUUUCTT |
| siSOD1-210 | 202 | aaaacacggtgggccaaag | 471 | AAAACACGGUGGGCCAAAGTT | 740 | CUUUGGCCCACCGUGUUUUTT |
| siSOD1-211 | 203 | aaacacggtgggccaaagg | 472 | AAACACGGUGGGCCAAAGGTT | 741 | CCUUUGGCCCACCGUGUUUTT |
| siSOD1-212 | 204 | aacacggtgggccaaagga | 473 | AACACGGUGGGCCAAAGGATT | 742 | UCCUUUGGCCCACCGUGUUTT |
| siSOD1-213 | 205 | acacggtgggccaaaggat | 474 | ACACGGUGGGCCAAAGGAUTT | 743 | AUCCUUUGGCCCACCGUGUTT |
| siSOD1-215 | 206 | acggtgggccaaaggatga | 475 | ACGGUGGGCCAAAGGAUGATT | 744 | UCAUCCUUUGGCCCACCGUTT |
| siSOD1-216 | 207 | cggtgggccaaaggatgaa | 476 | CGGUGGGCCAAAGGAUGAATT | 745 | UUCAUCCUUUGGCCCACCGTT |
| siSOD1-218 | 208 | gtgggccaaaggatgaaga | 477 | GUGGGCCAAAGGAUGAAGATT | 746 | UCUUCAUCCUUUGGCCCACTT |
| siSOD1-219 | 209 | tgggccaaaggatgaagag | 478 | UGGGCCAAAGGAUGAAGAGTT | 747 | CUCUUCAUCCUUUGGCCCATT |
| siSOD1-220 | 210 | gggccaaaggatgaagaga | 479 | GGGCCAAAGGAUGAAGAGATT | 748 | UCUCUUCAUCCUUUGGCCCTT |
| siSOD1-222 | 211 | gccaaaggatgaagagagg | 480 | GCCAAAGGAUGAAGAGAGGTT | 749 | CCUCUCUUCAUCCUUUGGCTT |
| siSOD1-224 | 212 | caaaggatgaagagaggca | 481 | CAAAGGAUGAAGAGAGGCATT | 750 | UGCCUCUCUUCAUCCUUUGTT |
| siSOD1-225 | 213 | aaaggatgaagagaggcat | 482 | AAAGGAUGAAGAGAGGCAUTT | 751 | AUGCCUCUCUUCAUCCUUUTT |
| SISOD1-227 | 214 | aggatgaagagaggcatgt | 483 | AGGAUGAAGAGAGGCAUGUTT | 752 | ACAUGCCUCUCUUCAUCCUTT |
| siSOD1-228 | 215 | ggatgaagagaggcatgtt | 484 | GGAUGAAGAGAGGCAUGUUTT | 753 | AACAUGCCUCUCUUCAUCCTT |
| siSOD1-229 | 216 | gatgaagagaggcatgttg | 485 | GAUGAAGAGAGGCAUGUUGTT | 754 | CAACAUGCCUCUCUUCAUCTT |
| siSOD1-231 | 217 | tgaagagaggcatgttgga | 486 | UGAAGAGAGGCAUGUUGGATT | 755 | UCCAACAUGCCUCUCUUCATT |
| siSOD1-233 | 218 | aagagaggcatgttggaga | 487 | AAGAGAGGCAUGUUGGAGATT | 756 | UCUCCAACAUGCCUCUCUUTT |
| siSOD1-234 | 219 | agagaggcatgttggagac | 488 | AGAGAGGCAUGUUGGAGACTT | 757 | GUCUCCAACAUGCCUCUCUTT |
| siSOD1-235 | 220 | gagaggcatgttggagact | 489 | GAGAGGCAUGUUGGAGACUTT | 758 | AGUCUCCAACAUGCCUCUCTT |
| siSOD1-236 | 221 | agaggcatgttggagactt | 490 | AGAGGCAUGUUGGAGACUUTT | 759 | AAGUCUCCAACAUGCCUCUTT |
| siSOD1-237 | 222 | gaggcatgttggagacttg | 491 | GAGGCAUGUUGGAGACUUGTT | 760 | CAAGUCUCCAACAUGCCUCTT |
| siSOD1-241 | 223 | catgttggagacttgggca | 492 | CAUGUUGGAGACUUGGGCATT | 761 | UGCCCAAGUCUCCAACAUGTT |
| siSOD1-242 | 224 | atgttggagacttgggcaa | 493 | AUGUUGGAGACUUGGGCAATT | 762 | UUGCCCAAGUCUCCAACAUTT |
| siSOD1-243 | 225 | tgttggagacttgggcaat | 494 | UGUUGGAGACUUGGGCAAUTT | 763 | AUUGCCCAAGUCUCCAACATT |
| siSOD1-244 | 226 | gttggagacttgggcaatg | 495 | GUUGGAGACUUGGGCAAUGTT | 764 | CAUUGCCCAAGUCUCCAACTT |
| siSOD1-245 | 227 | ttggagacttgggcaatgt | 496 | UUGGAGACUUGGGCAAUGUTT | 765 | ACAUUGCCCAAGUCUCCAATT |
| siSOD1-246 | 228 | tggagacttgggcaatgtg | 497 | UGGAGACUUGGGCAAUGUGTT | 766 | CACAUUGCCCAAGUCUCCATT |
| siSOD1-247 | 229 | ggagacttgggcaatgtga | 498 | GGAGACUUGGGCAAUGUGATT | 767 | UCACAUUGCCCAAGUCUCCTT |
| siSOD1-249 | 230 | agacttgggcaatgtgact | 499 | AGACUUGGGCAAUGUGACUTT | 768 | AGUCACAUUGCCCAAGUCUTT |
| siSOD1-252 | 231 | cttgggcaatgtgactgct | 500 | CUUGGGCAAUGUGACUGCUTT | 769 | AGCAGUCACAUUGCCCAAGTT |
| siSOD1-254 | 232 | tgggcaatgtgactgctga | 501 | UGGGCAAUGUGACUGCUGATT | 770 | UCAGCAGUCACAUUGCCCATT |
| siSOD1-256 | 233 | ggcaatgtgactgctgaca | 502 | GGCAAUGUGACUGCUGACATT | 771 | UGUCAGCAGUCACAUUGCCTT |
| siSOD1-257 | 234 | gcaatgtgactgctgacaa | 503 | GCAAUGUGACUGCUGACAATT | 772 | UUGUCAGCAGUCACAUUGCTT |
| siSOD1-258 | 235 | caatgtgactgctgacaaa | 504 | CAAUGUGACUGCUGACAAATT | 773 | UUUGUCAGCAGUCACAUUGTT |
| siSOD1-260 | 236 | atgtgactgctgacaaaga | 505 | AUGUGACUGCUGACAAAGATT | 774 | UCUUUGUCAGCAGUCACAUTT |
| siSOD1-261 | 237 | tgtgactgctgacaaagat | 506 | UGUGACUGCUGACAAAGAUTT | 775 | AUCUUUGUCAGCAGUCACATT |
| siSOD1-262 | 238 | gtgactgctgacaaagatg | 507 | GUGACUGCUGACAAAGAUGTT | 776 | CAUCUUUGUCAGCAGUCACTT |
| siSOD1-263 | 239 | tgactgctgacaaagatgc | 508 | UGACUGCUGACAAAGAUGCTT | 777 | GCAUCUUUGUCAGCAGUCATT |
| siSOD1-264 | 240 | gactgctgacaaagatgct | 509 | GACUGCUGACAAAGAUGCUTT | 778 | AGCAUCUUUGUCAGCAGUCTT |
| siSOD1-266 | 241 | ctgctgacaaagatgctgt | 510 | CUGCUGACAAAGAUGCUGUTT | 779 | ACAGCAUCUUUGUCAGCAGTT |
| siSOD1-270 | 242 | tgacaaagatgctgtggcc | 511 | UGACAAAGAUGCUGUGGCCTT | 780 | GGCCACAGCAUCUUUGUCATT |
| siSOD1-272 | 243 | acaaagatgctgtggccga | 512 | ACAAAGAUGCUGUGGCCGATT | 781 | UCGGCCACAGCAUCUUUGUTT |
| siSOD1-273 | 244 | caaagatgctgtggccgat | 513 | CAAAGAUGCUGUGGCCGAUTT | 782 | AUCGGCCACAGCAUCUUUGTT |
| siSOD1-275 | 245 | aagatgctgtggccgatgt | 514 | AAGAUGCUGUGGCCGAUGUTT | 783 | ACAUCGGCCACAGCAUCUUTT |
| siSOD1-276 | 246 | agatgctgtggccgatgtg | 515 | AGAUGCUGUGGCCGAUGUGTT | 784 | CACAUCGGCCACAGCAUCUTT |
| siSOD1-279 | 247 | tgctgtggccgatgtgtct | 516 | UGCUGUGGCCGAUGUGUCUTT | 785 | AGACACAUCGGCCACAGCATT |
| siSOD1-280 | 248 | gctgtggccgatgtgtcta | 517 | GCUGUGGCCGAUGUGUCUATT | 786 | UAGACACAUCGGCCACAGCTT |
| siSOD1-281 | 249 | ctgtggccgatgtgtctat | 518 | CUGUGGCCGAUGUGUCUAUTT | 787 | AUAGACACAUCGGCCACAGTT |
| siSOD1-282 | 250 | tgtggccgatgtgtctatt | 519 | UGUGGCCGAUGUGUCUAUUTT | 788 | AAUAGACACAUCGGCCACATT |
| siSOD1-283 | 251 | gtggccgatgtgtctattg | 520 | GUGGCCGAUGUGUCUAUUGTT | 789 | CAAUAGACACAUCGGCCACTT |
| siSOD1-284 | 252 | tggccgatgtgtctattga | 521 | UGGCCGAUGUGUCUAUUGATT | 790 | UCAAUAGACACAUCGGCCATT |
| siSOD1-285 | 253 | ggccgatgtgtctattgaa | 522 | GGCCGAUGUGUCUAUUGAATT | 791 | UUCAAUAGACACAUCGGCCTT |
| siSOD1-286 | 254 | gccgatgtgtctattgaag | 523 | GCCGAUGUGUCUAUUGAAGTT | 792 | CUUCAAUAGACACAUCGGCTT |
| siSOD1-287 | 255 | ccgatgtgtctattgaaga | 524 | CCGAUGUGUCUAUUGAAGATT | 793 | UCUUCAAUAGACACAUCGGTT |
| siSOD1-288 | 256 | cgatgtgtctattgaagat | 525 | CGAUGUGUCUAUUGAAGAUTT | 794 | AUCUUCAAUAGACACAUCGTT |
| siSOD1-299 | 257 | ttgaagattctgtgatctc | 526 | UUGAAGAUUCUGUGAUCUCTT | 795 | GAGAUCACAGAAUCUUCAATT |
| siSOD1-300 | 258 | tgaagattctgtgatctca | 527 | UGAAGAUUCUGUGAUCUCATT | 796 | UGAGAUCACAGAAUCUUCATT |
| siSOD1-301 | 259 | gaagattctgtgatctcac | 528 | GAAGAUUCUGUGAUCUCACTT | 797 | GUGAGAUCACAGAAUCUUCTT |
| siSOD1-302 | 260 | aagattctgtgatctcact | 529 | AAGAUUCUGUGAUCUCACUTT | 798 | AGUGAGAUCACAGAAUCUUTT |
| siSOD1-303 | 261 | agattctgtgatctcactc | 530 | AGAUUCUGUGAUCUCACUCTT | 799 | GAGUGAGAUCACAGAAUCUTT |
| siSOD1-304 | 262 | gattctgtgatctcactct | 531 | GAUUCUGUGAUCUCACUCUTT | 800 | AGAGUGAGAUCACAGAAUCTT |
| siSOD1-305 | 263 | attctgtgatctcactctc | 532 | AUUCUGUGAUCUCACUCUCTT | 801 | GAGAGUGAGAUCACAGAAUTT |
| siSOD1-306 | 264 | ttctgtgatctcactctca | 533 | UUCUGUGAUCUCACUCUCATT | 802 | UGAGAGUGAGAUCACAGAATT |
| siSOD1-307 | 265 | tctgtgatctcactctcag | 534 | UCUGUGAUCUCACUCUCAGTT | 803 | CUGAGAGUGAGAUCACAGATT |
| siSOD1-309 | 266 | tgtgatctcactctcagga | 535 | UGUGAUCUCACUCUCAGGATT | 804 | UCCUGAGAGUGAGAUCACATT |
| siSOD1-311 | 267 | tgatctcactctcaggaga | 536 | UGAUCUCACUCUCAGGAGATT | 805 | UCUCCUGAGAGUGAGAUCATT |
| siSOD1-314 | 268 | tctcactctcaggagacca | 537 | UCUCACUCUCAGGAGACCATT | 806 | UGGUCUCCUGAGAGUGAGATT |
| siSOD1-315 | 269 | ctcactctcaggagaccat | 538 | CUCACUCUCAGGAGACCAUTT | 807 | AUGGUCUCCUGAGAGUGAGTT |
| siSOD1-316 | 270 | tcactctcaggagaccatt | 539 | UCACUCUCAGGAGACCAUUTT | 808 | AAUGGUCUCCUGAGAGUGATT |
| siSOD1-317 | 271 | cactctcaggagaccattg | 540 | CACUCUCAGGAGACCAUUGTT | 809 | CAAUGGUCUCCUGAGAGUGTT |
| siSOD1-318 | 272 | actctcaggagaccattgc | 541 | ACUCUCAGGAGACCAUUGCTT | 810 | GCAAUGGUCUCCUGAGAGUTT |
| siSOD1-319 | 273 | ctctcaggagaccattgca | 542 | CUCUCAGGAGACCAUUGCATT | 811 | UGCAAUGGUCUCCUGAGAGTT |
| siSOD1-320 | 274 | tctcaggagaccattgcat | 543 | UCUCAGGAGACCAUUGCAUTT | 812 | AUGCAAUGGUCUCCUGAGATT |
| siSOD1-322 | 275 | tcaggagaccattgcatca | 544 | UCAGGAGACCAUUGCAUCATT | 813 | UGAUGCAAUGGUCUCCUGATT |
| siSOD1-323 | 276 | caggagaccattgcatcat | 545 | CAGGAGACCAUUGCAUCAUTT | 814 | AUGAUGCAAUGGUCUCCUGTT |
| siSOD1-324 | 277 | aggagaccattgcatcatt | 546 | AGGAGACCAUUGCAUCAUUTT | 815 | AAUGAUGCAAUGGUCUCCUTT |
| siSOD1-325 | 278 | ggagaccattgcatcattg | 547 | GGAGACCAUUGCAUCAUUGTT | 816 | CAAUGAUGCAAUGGUCUCCTT |
| siSOD1-326 | 279 | gagaccattgcatcattgg | 548 | GAGACCAUUGCAUCAUUGGTT | 817 | CCAAUGAUGCAAUGGUCUCTT |
| siSOD1-327 | 280 | agaccattgcatcattggc | 549 | AGACCAUUGCAUCAUUGGCTT | 818 | GCCAAUGAUGCAAUGGUCUTT |
| siSOD1-333 | 281 | ttgcatcattggccgcaca | 550 | UUGCAUCAUUGGCCGCACATT | 819 | UGUGCGGCCAAUGAUGCAATT |
| siSOD1-335 | 282 | gcatcattggccgcacact | 551 | GCAUCAUUGGCCGCACACUTT | 820 | AGUGUGCGGCCAAUGAUGCTT |
| siSOD1-338 | 283 | tcattggccgcacactggt | 552 | UCAUUGGCCGCACACUGGUTT | 821 | ACCAGUGUGCGGCCAAUGATT |
| siSOD1-344 | 284 | gccgcacactggtggtcca | 553 | GCCGCACACUGGUGGUCCATT | 822 | UGGACCACCAGUGUGCGGCTT |
| siSOD1-347 | 285 | gcacactggtggtccatga | 554 | GCACACUGGUGGUCCAUGATT | 823 | UCAUGGACCACCAGUGUGCTT |
| siSOD1-348 | 286 | cacactggtggtccatgaa | 555 | CACACUGGUGGUCCAUGAATT | 824 | UUCAUGGACCACCAGUGUGTT |
| siSOD1-349 | 287 | acactggtggtccatgaaa | 556 | ACACUGGUGGUCCAUGAAATT | 825 | UUUCAUGGACCACCAGUGUTT |
| siSOD1-350 | 288 | cactggtggtccatgaaaa | 557 | CACUGGUGGUCCAUGAAAATT | 826 | UUUUCAUGGACCACCAGUGTT |
| siSOD1-351 | 289 | actggtggtccatgaaaaa | 558 | ACUGGUGGUCCAUGAAAAATT | 827 | UUUUUCAUGGACCACCAGUTT |
| siSOD1-352 | 290 | ctggtggtccatgaaaaag | 559 | CUGGUGGUCCAUGAAAAAGTT | 828 | CUUUUUCAUGGACCACCAGTT |
| siSOD1-353 | 291 | tggtggtccatgaaaaagc | 560 | UGGUGGUCCAUGAAAAAGCTT | 829 | GCUUUUUCAUGGACCACCATT |
| siSOD1-354 | 292 | ggtggtccatgaaaaagca | 561 | GGUGGUCCAUGAAAAAGCATT | 830 | UGCUUUUUCAUGGACCACCTT |
| siSOD1-356 | 293 | tggtccatgaaaaagcaga | 562 | UGGUCCAUGAAAAAGCAGATT | 831 | UCUGCUUUUUCAUGGACCATT |
| siSOD1-357 | 294 | ggtccatgaaaaagcagat | 563 | GGUCCAUGAAAAAGCAGAUTT | 832 | AUCUGCUUUUUCAUGGACCTT |
| siSOD1-359 | 295 | tccatgaaaaagcagatga | 564 | UCCAUGAAAAAGCAGAUGATT | 833 | UCAUCUGCUUUUUCAUGGATT |
| siSOD1-360 | 296 | ccatgaaaaagcagatgac | 565 | CCAUGAAAAAGCAGAUGACTT | 834 | GUCAUCUGCUUUUUCAUGGTT |
| siSOD1-361 | 297 | catgaaaaagcagatgact | 566 | CAUGAAAAAGCAGAUGACUTT | 835 | AGUCAUCUGCUUUUUCAUGTT |
| siSOD1-363 | 298 | tgaaaaagcagatgacttg | 567 | UGAAAAAGCAGAUGACUUGTT | 836 | CAAGUCAUCUGCUUUUUCATT |
| siSOD1-365 | 299 | aaaaagcagatgacttggg | 568 | AAAAAGCAGAUGACUUGGGTT | 837 | CCCAAGUCAUCUGCUUUUUTT |
| siSOD1-366 | 300 | aaaagcagatgacttgggc | 569 | AAAAGCAGAUGACUUGGGCTT | 838 | GCCCAAGUCAUCUGCUUUUTT |
| siSOD1-367 | 301 | aaagcagatgacttgggca | 570 | AAAGCAGAUGACUUGGGCATT | 839 | UGCCCAAGUCAUCUGCUUUTT |
| siSOD1-368 | 302 | aagcagatgacttgggcaa | 571 | AAGCAGAUGACUUGGGCAATT | 840 | UUGCCCAAGUCAUCUGCUUTT |
| siSOD1-369 | 303 | agcagatgacttgggcaaa | 572 | AGCAGAUGACUUGGGCAAATT | 841 | UUUGCCCAAGUCAUCUGCUTT |
| siSOD1-370 | 304 | gcagatgacttgggcaaag | 573 | GCAGAUGACUUGGGCAAAGTT | 842 | CUUUGCCCAAGUCAUCUGCTT |
| siSOD1-371 | 305 | cagatgacttgggcaaagg | 574 | CAGAUGACUUGGGCAAAGGTT | 843 | CCUUUGCCCAAGUCAUCUGTT |
| siSOD1-372 | 306 | agatgacttgggcaaaggt | 575 | AGAUGACUUGGGCAAAGGUTT | 844 | ACCUUUGCCCAAGUCAUCUTT |
| siSOD1-375 | 307 | tgacttgggcaaaggtgga | 576 | UGACUUGGGCAAAGGUGGATT | 845 | UCCACCUUUGCCCAAGUCATT |
| siSOD1-376 | 308 | gacttgggcaaaggtggaa | 577 | GACUUGGGCAAAGGUGGAATT | 846 | UUCCACCUUUGCCCAAGUCTT |
| siSOD1-377 | 309 | acttgggcaaaggtggaaa | 578 | ACUUGGGCAAAGGUGGAAATT | 847 | UUUCCACCUUUGCCCAAGUTT |
| SISOD1-378 | 310 | cttgggcaaaggtggaaat | 579 | CUUGGGCAAAGGUGGAAAUTT | 848 | AUUUCCACCUUUGCCCAAGTT |
| siSOD1-379 | 311 | ttgggcaaaggtggaaatg | 580 | UUGGGCAAAGGUGGAAAUGTT | 849 | CAUUUCCACCUUUGCCCAATT |
| siSOD1-380 | 312 | tgggcaaaggtggaaatga | 581 | UGGGCAAAGGUGGAAAUGATT | 850 | UCAUUUCCACCUUUGCCCATT |
| siSOD1-381 | 313 | gggcaaaggtggaaatgaa | 582 | GGGCAAAGGUGGAAAUGAATT | 851 | UUCAUUUCCACCUUUGCCCTT |
| siSOD1-382 | 314 | ggcaaaggtggaaatgaag | 583 | GGCAAAGGUGGAAAUGAAGTT | 852 | CUUCAUUUCCACCUUUGCCTT |
| siSOD1-383 | 315 | gcaaaggtggaaatgaaga | 584 | GCAAAGGUGGAAAUGAAGATT | 853 | UCUUCAUUUCCACCUUUGCTT |
| siSOD1-384 | 316 | caaaggtggaaatgaagaa | 585 | CAAAGGUGGAAAUGAAGAATT | 854 | UUCUUCAUUUCCACCUUUGTT |
| siSOD1-386 | 317 | aaggtggaaatgaagaaag | 586 | AAGGUGGAAAUGAAGAAAGTT | 855 | CUUUCUUCAUUUCCACCUUTT |
| siSOD1-387 | 318 | aggtggaaatgaagaaagt | 587 | AGGUGGAAAUGAAGAAAGUTT | 856 | ACUUUCUUCAUUUCCACCUTT |
| siSOD1-388 | 319 | ggtggaaatgaagaaagta | 588 | GGUGGAAAUGAAGAAAGUATT | 857 | UACUUUCUUCAUUUCCACCTT |
| siSOD1-389 | 320 | gtggaaatgaagaaagtac | 589 | GUGGAAAUGAAGAAAGUACTT | 858 | GUACUUUCUUCAUUUCCACTT |
| siSOD1-397 | 321 | gaagaaagtacaaagacag | 590 | GAAGAAAGUACAAAGACAGTT | 859 | CUGUCUUUGUACUUUCUUCTT |
| siSOD1-399 | 322 | agaaagtacaaagacagga | 591 | AGAAAGUACAAAGACAGGATT | 860 | UCCUGUCUUUGUACUUUCUTT |
| siSOD1-400 | 323 | gaaagtacaaagacaggaa | 592 | GAAAGUACAAAGACAGGAATT | 861 | UUCCUGUCUUUGUACUUUCTT |
| siSOD1-402 | 324 | aagtacaaagacaggaaac | 593 | AAGUACAAAGACAGGAAACTT | 862 | GUUUCCUGUCUUUGUACUUTT |
| siSOD1-405 | 325 | tacaaagacaggaaacgct | 594 | UACAAAGACAGGAAACGCUTT | 863 | AGCGUUUCCUGUCUUUGUATT |
| siSOD1-408 | 326 | aaagacaggaaacgctgga | 595 | AAAGACAGGAAACGCUGGATT | 864 | UCCAGCGUUUCCUGUCUUUTT |
| siSOD1-409 | 327 | aagacaggaaacgctggaa | 596 | AAGACAGGAAACGCUGGAATT | 865 | UUCCAGCGUUUCCUGUCUUTT |
| siSOD1-410 | 328 | agacaggaaacgctggaag | 597 | AGACAGGAAACGCUGGAAGTT | 866 | CUUCCAGCGUUUCCUGUCUTT |
| siSOD1-411 | 329 | gacaggaaacgctggaagt | 598 | GACAGGAAACGCUGGAAGUTT | 867 | ACUUCCAGCGUUUCCUGUCTT |
| siSOD1-412 | 330 | acaggaaacgctggaagtc | 599 | ACAGGAAACGCUGGAAGUCTT | 868 | GACUUCCAGCGUUUCCUGUTT |
| siSOD1-414 | 331 | aggaaacgctggaagtcgt | 600 | AGGAAACGCUGGAAGUCGUTT | 869 | ACGACUUCCAGCGUUUCCUTT |
| siSOD1-415 | 332 | ggaaacgctggaagtcgtt | 601 | GGAAACGCUGGAAGUCGUUTT | 870 | AACGACUUCCAGCGUUUCCTT |
| siSOD1-416 | 333 | gaaacgctggaagtcgttt | 602 | GAAACGCUGGAAGUCGUUUTT | 871 | AAACGACUUCCAGCGUUUCTT |
| siSOD1-417 | 334 | aaacgctggaagtcgtttg | 603 | AAACGCUGGAAGUCGUUUGTT | 872 | CAAACGACUUCCAGCGUUUTT |
| siSOD1-418 | 335 | aacgctggaagtcgtttgg | 604 | AACGCUGGAAGUCGUUUGGTT | 873 | CCAAACGACUUCCAGCGUUTT |
| siSOD1-420 | 336 | cgctggaagtcgtttggct | 605 | CGCUGGAAGUCGUUUGGCUTT | 874 | AGCCAAACGACUUCCAGCGTT |
| siSOD1-421 | 337 | gctggaagtcgtttggctt | 606 | GCUGGAAGUCGUUUGGCUUTT | 875 | AAGCCAAACGACUUCCAGCTT |
| siSOD1-423 | 338 | tggaagtcgtttggcttgt | 607 | UGGAAGUCGUUUGGCUUGUTT | 876 | ACAAGCCAAACGACUUCCATT |
| siSOD1-424 | 339 | ggaagtcgtttggcttgtg | 608 | GGAAGUCGUUUGGCUUGUGTT | 877 | CACAAGCCAAACGACUUCCTT |
| siSOD1-425 | 340 | gaagtcgtttggcttgtgg | 609 | GAAGUCGUUUGGCUUGUGGTT | 878 | CCACAAGCCAAACGACUUCTT |
| siSOD1-426 | 341 | aagtcgtttggcttgtggt | 610 | AAGUCGUUUGGCUUGUGGUTT | 879 | ACCACAAGCCAAACGACUUTT |
| siSOD1-429 | 342 | tcgtttggcttgtggtgta | 611 | UCGUUUGGCUUGUGGUGUATT | 880 | UACACCACAAGCCAAACGATT |
| siSOD1-430 | 343 | cgtttggcttgtggtgtaa | 612 | CGUUUGGCUUGUGGUGUAATT | 881 | UUACACCACAAGCCAAACGTT |
| siSOD1-431 | 344 | gtttggcttgtggtgtaat | 613 | GUUUGGCUUGUGGUGUAAUTT | 882 | AUUACACCACAAGCCAAACTT |
| siSOD1-432 | 345 | tttggcttgtggtgtaatt | 614 | UUUGGCUUGUGGUGUAAUUTT | 883 | AAUUACACCACAAGCCAAATT |
| siSOD1-433 | 346 | ttggcttgtggtgtaattg | 615 | UUGGCUUGUGGUGUAAUUGTT | 884 | CAAUUACACCACAAGCCAATT |
| siSOD1-434 | 347 | tggcttgtggtgtaattgg | 616 | UGGCUUGUGGUGUAAUUGGTT | 885 | CCAAUUACACCACAAGCCATT |
| siSOD1-435 | 348 | ggcttgtggtgtaattggg | 617 | GGCUUGUGGUGUAAUUGGGTT | 886 | CCCAAUUACACCACAAGCCTT |
| siSOD1-436 | 349 | gcttgtggtgtaattggga | 618 | GCUUGUGGUGUAAUUGGGATT | 887 | UCCCAAUUACACCACAAGCTT |
| siSOD1-437 | 350 | cttgtggtgtaattgggat | 619 | CUUGUGGUGUAAUUGGGAUTT | 888 | AUCCCAAUUACACCACAAGTT |
| siSOD1-443 | 351 | gtgtaattgggatcgccca | 620 | GUGUAAUUGGGAUCGCCCATT | 889 | UGGGCGAUCCCAAUUACACTT |
| siSOD1-444 | 352 | tgtaattgggatcgcccaa | 621 | UGUAAUUGGGAUCGCCCAATT | 890 | UUGGGCGAUCCCAAUUACATT |
| siSOD1-445 | 353 | gtaattgggategcccaat | 622 | GUAAUUGGGAUCGCCCAAUTT | 891 | AUUGGGCGAUCCCAAUUACTT |
| siSOD1-446 | 354 | taattgggategcccaata | 623 | UAAUUGGGAUCGCCCAAUATT | 892 | UAUUGGGCGAUCCCAAUUATT |
| siSOD1-447 | 355 | aattgggategcccaataa | 624 | AAUUGGGAUCGCCCAAUAATT | 893 | UUAUUGGGCGAUCCCAAUUTT |

n.b.: Target sequence is identical to the identified sense sequence but the nucleotide ″U″ is converted to ″T″ and excluding the overhang 2 nucleotides ″TT″.

TABLE 7
ACO Sequences

| | | Size | SEQ ID |
|---|---|---|---|
| ACO Name | ACO Sequence (5′-3′) | (nt) | NO |
| N22 | L1-U*A*G*A*C*U*A*G*A*U*C*A*U*A*U*G*A*G*U*A*G*A | 22 | 1 |
| N20 | L1-U*A*G*A*C*U*A*G*A*U*C*A*U*A*U*G*A*G*U*A | 20 | 2 |
| N18 | L1-U*A*G*A*C*U*A*G*A*U*C*A*U*A*U*G*A*G | 18 | 3 |
| N16 | L1-U*A*G*A*C*U*A*G*A*U*C*A*U*A*U*G | 16 | 4 |
| N15 | L1-U*A*G*A*C*U*A*G*A*U*C*A*U*A*U | 15 | 5 |
| N14 | L1-U*A*G*A*C*U*A*G*A*U*C*A*U*A | 14 | 6 |
| N12 | L1-U*A*G*A*C*U*A*G*A*U*C*A | 12 | 7 |
| N10 | L1-U*A*G*A*C*U*A*G*A*U | 10 | 8 |
| N8 | L1-U*A*G*A*C*U*A*G | 8 | 9 |
| N6 | L1-U*A*G*A*C*U | 6 | 10 |
| AC2(22) | L1- | 22 | 11 |
| | meU*meA*meG*meA*meC*meU*meA*meG*meA*meU*meC*meA*meU*meA*meU*meG* | | |
| | meA*meG*meU*meA*meG*meA | | |
| AC2(18) | L1-meU*meA*meG*meA*meC*meU*meA*meG*meA*meU*meC*meA*meU*meA*meU*meG* | 18 | 12 |
| | meA*meG | | |
| AC2(16) | L1-meU*meA*meG*meA*meC*meU*meA*meG*meA*meU*meC*meA*meU*meA*meU*meG | 16 | 13 |
| AC2(15) | L1-meU*meA*meG*meA*meC*meU*meA*meG*meA*meU*meC*meA*mcU*meA*meU | 15 | 14 |
| AC2(14) | L1-meU*meA*meG*meA*meC*meU*meA*meG*meA*meU*meC*meA*meU*meA | 14 | 15 |
| AC2(13) | L1- | 13 | 16 |
| | meU*meA*meG*meA*meC*meU*meA*meG*meA*meU*meC*meA*meU | | |
| AC2(12) | L1-meU*meA*meG*meA*meC*meU*meA*meG*meA*meU*meC*meA | 12 | 17 |
| AC2(11) | L1-meU*meA*meG*meA*meC*meU*meA*meG*meA*meU*meC | 11 | 18 |
| AC2(10) | L1-meU*meA*meG*meA*meC*meU*meA*meG*meA*meU | 10 | 19 |
| AC2(9) | L1-meU*meA*meG*meA*meC*meU*meA*meG*meA | 9 | 20 |
| AC2(8) | L1-meU*meA*meG*meA*meC*meU*meA*meG | 8 | 21 |
| AC2(6) | L1-meU*meA*meG*meA*meC*meU | 6 | 22 |

¶n.b .: upper case, RNA; *, phosphorothioate (PS) backbone modification; me, 2′-O-methoxyethyl (2′MOE); C, 5′ methyl cytosine; U, 5′-methyl uracil; L1, spacer-18 linker.

TABLE 8
Oligonucleotide strand sequences and duplex compositions

| | | | SEQ | | |
|---|---|---|---|---|---|
| | | Target | ID | | Size |
| Oligonucleotide name | Type | gene | NO | Sequence (5′-3′) | (nt) |
| asSOD1(Tofersen) | ASO | SOD1 | 975 | meC*meAmeG*meGmeA*t*a*c*a*t*t*t*c*t*a*meCmeA*meGmeC*meT | 20 |
| DS17-0001 | siRNA | SOD1 | 384 | CGAGCAGAAGGAAAGUAAUTT | 21 |
| | | | 653 | AUUACUUUCCUUCUGCUCGTT | 21 |
| DS17-0002 | siRNA | SOD1 | 372 | AGGGCAUCAUCAAUUUCGATT | 21 |
| | | | 641 | UCGAAAUUGAUGAUGCCCUTT | 21 |
| DS17-0003 | siRNA | SOD1 | 409 | GCAUUAAAGGACUGACUGATT | 21 |
| | | | 678 | UCAGUCAGUCCUUUAAUGCTT | 21 |
| DS17-0004 | siRNA | SOD1 | 357 | CGACGAAGGCCGUGUGCGUTT | 21 |
| | | | 626 | ACGCACACGGCCUUCGUCGTT | 21 |
| DS17-0005 | siRNA | SOD1 | 486 | UGAAGAGAGGCAUGUUGGATT | 21 |
| | | | 755 | UCCAACAUGCCUCUCUUCATT | 21 |
| DS17-0029 | siRNA | SOD1 | 588 | GGUGGAAAUGAAGAAAGUATT | 21 |
| | | | 857 | UACUUUCUUCAUUUCCACCTT | 21 |
| DS17-01N3 | siRNA | SOD1 | 912 | UCGAGCAGAAGGAAAGUAAU | 20 |
| | | | 913 | AUUACUUUCCUUCUGCUCGAAA | 22 |
| DS17-02N3 | siRNA | SOD1 | 914 | CAGGGCAUCAUCAAUUUCGA | 20 |
| | | | 915 | UCGAAAUUGAUGAUGCCCUGCA | 22 |
| DS17-03N3 | siRNA | SOD1 | 916 | AGCAUUAAAGGACUGACUGA | 20 |
| | | | 917 | UCAGUCAGUCCUUUAAUGCUUC | 22 |
| DS17-04N3 | siRNA | SOD1 | 918 | GCGACGAAGGCCGUGUGCGU | 20 |
| | | | 919 | ACGCACACGGCCUUCGUCGCCA | 22 |
| DS17-05N3 | siRNA | SOD1 | 920 | GCAAUGUGACUGCUGACAAA | 20 |
| | | | 921 | UUUGUCAGCAGUCACAUUGCCC | 22 |
| DS17-01M3 | siRNA | SOD1 | 922 | mU*fC*mGfAmGfCmAfGfAfAfGfGmAfAmAfGmUfA*mA*fU | 20 |
| | | | 923 | pmA*fU*mUfAmCfUmUfUmCfCmUfUmCfUmGfCmUfCmGfA*mA*fA | 22 |
| DS17-02M3 | siRNA | SOD1 | 924 | mC*fA*mGfGmGfCmAfUfCfAfUfCmAfAmUfUmUfC*mG*fA | 20 |
| | | | 925 | pmU*fC*mGfAmAfAmUfUmGfUmUfGmAfUmGfCmCfCmUfG*mC*fA | 22 |
| DS17-03M3 | siRNA | SOD1 | 926 | mA*fG*mCfAmUfUmAfAfAfGfGfAmCfUmGfAmCfU*mG*fA | 20 |
| | | | 927 | pmU*fC*mAfGmUfCmAfGmUfCmCfUmUfUmAfAmUfGmCfU*mU*fC | 22 |
| DS17-04M3 | siRNA | SOD1 | 928 | mG*fC*mGfAmCfGmAfAfGfGfCfCmGfUmGfUmGfC*mG*fU | 20 |
| | | | 929 | pmA*fC*mGfCmAfCmAfCmGfGmCfCmUfUmCfGmUfCmGfC*mC*fA | 22 |
| DS17-05M3 | siRNA | SOD1 | 930 | mG*fC*mAfAmUfGmUfGfAfCfUfGmCfUmGfAmCfA*mA*fA | 20 |
| | | | 931 | pmU*fU*mUfGmUfCmAfGmCfAmGfUmCfAmCfAmUfUmGfC*mC*fC | 22 |
| DS17-01M3-AC1(me14)-L9V3 | ODV-siRNA | SOD1 | 932 | mU*fC*mGfAmGfCmAfGfAfAfGfGmAfAmAfGmUfA*mA*fU-S9- | 34 |
| | | | 933 | mA*fU*mUfAmCfUmUfUmCfCmUfUmCfUmGfCmUfCmGfA*mA*fA | 22 |
| DS17-02M3-AC1(me14)-L9V3 | ODV-siRNA | SOD1 | 934 | mC*fA*mGfGmGfCmAfUfCfAfUfCmAfAmUfUmUfC*mG*fA-S9- | 34 |
| | | | | meU*meU*meG*meU*meA*meU*meU*meC*meU*meA*meU*meG*meU*meU | |
| | | | 935 | mU*fC*mGfAmAfAmUfUmGfUmUfGmAfUmGfCmCfCmUfG*mC*fA | 22 |
| DS17-03M3-AC1(me14)-L9V3 | ODV-siRNA | SOD1 | 936 | mA*fG*mCfAmUfUmAfAfAfGfGfAmCfUmGfAmCfU*mG*fA-S9- | 34 |
| | | | | meU*meU*meG*meU*meA*meU*meU*meC*meU*meA*meU*meG*meU*meU | |
| | | | 937 | mU*fC*mAfGmUfCmAfGmUfCmCfUmUfUmAfAmUfGmCfU*mU*fC | 22 |
| DS17-04M3-AC1(me14)-L9V3 | ODV-siRNA | SOD1 | 938 | mG*fC*mGfAmCfGmAfAfGfGfCfCmGfUmGfUmGfC*mG*fU-S9- | 34 |
| | | | | meU*meU*meG*meU*meA*meU*meU*meC*meU*meA*meU*meG*meU*meU | |
| | | | 939 | mA*fC*mGfCmAfCmAfCmGfGmCfCmUfUmCfGmUfCmGfC*mC*LA | 22 |
| DS17-05M3-AC1(me14)-L9V3 | ODV-siRNA | SOD1 | 940 | mG*fC*mAfAmUfGmUfGfAfCfUfGmCfUmGfAmCfA*mA*fA-S9- | 34 |
| | | | | meU*meU*meG*meU*meA*meU*meU*meC*meU*meA*meU*mcG*meU*meU | |
| | | | 941 | mU*fU*mUfGmUfCmAfGmCfAmGfUmCfAmCfAmUfUmGfC*mC*fC | 22 |
| DS17-29M2-AC1(me14)-L9V3 | ODV-siRNA | SOD1 | 942 | fG*mG*fUmGfGmAfAmAfUfGfAmAfGmAfAmAf*GmU*fA-S9- | 34 |
| | | | | meU*meU*meG*meU*meA*meU*meU*meC*meU*meA*meU*meG*meU*meU | |
| | | | 47 | mU*fA*mCfUmUfUmCfUmUfCmAfUmUfUmCfCmAfCmC*fU*mU | 21 |
| DS17-01M3v-AC1(me14)- | ODV-siRNA | SOD1 | 932 | mU*fC*mGfAmGfCmAfGfAfAfGfGmAfAmAfGmUfA*mA*fU-S9- | 34 |
| | | | | meU*meU*meG*meU*meA*meU*meU*meC*meU*meA*meU*meG*meU*meU | |
| L9V3 | | | 47 | VPmA*fU*mUfAmCfUmUfUmCfCmUfUmCfUmGfCmUfCmGfA*mA*fA | 22 |
| DS17-02M3v-AC1(me14)- | ODV-siRNA | SOD1 | 934 | mC*fA*mGfGmGfCmAfUfCfAfUfCmAfAmUfUmUfC*mG*fA-S9- | 34 |
| | | | | meU*meU*meG*meU*meA*meU*meU*meC*meU*meA*meU*meG*meU*meU | |
| L9V3 | | | 943 | VPmU*fC*mGfAmAfAmUfUmGfUmUfGmAfUmGfCmCfCmUfG*mC*fA | 22 |
| DS17-03M3v-AC1(me14)- | ODV-siRNA | SOD1 | 936 | mA*fG*mCfAmUfUmAfAfAfGfGfAmCfUmGfAmCfU*mG*fA-S9- | 34 |
| | | | | meU*meU*meG*meU*meA*meU*meU*meC*meU*meA*meU*meG*meU*meU | |
| L9V3 | | | 944 | VPmU*fC*mAfGmUfCmAfGmUfCmCfUmUfUmAfAmUfGmCfU*mU*fC | 22 |
| DS17-04M3v-AC1(me14)- | ODV-siRNA | SOD1 | 938 | mG*fC*mGfAmCfGmAfAfGfGfCfCmGfUmGfUmGfC*mG*fU-S9- | 34 |
| | | | | meU*meU*meG*meU*meA*meU*meU*meC*meU*meA*meU*meG*meU*meU | |
| L9V3 | | | 950 | VPmA*fC*mGfCmAfCmAfCmGfGmCfCmUfUmCfGmUfCmGfC*mC*LA | 22 |
| DS17-05M3v-AC1(me14)- | ODV-siRNA | SOD1 | 940 | mG*fC*mAfAmUfGmUfGfAfCfUfGmCfUmGfAmCfA*mA*fA-S9- | 34 |
| L9V3 | | | 951 | VPmU*fU*mUfGmUfCmAfGmCfAmGfUmCfAmCfAmUfUmGfC*mC*fC | 22 |
| DS17-04M3-asSOD1-1-L9V3 | siRNA + ASO | SOD1 | 952 | mG*fC*mGfAmCfGmAfAfGfGfCfCmGfUmGfUmGfC*mG*fU-S9- | 40 |
| | | | | meC*meAmeG*meGmeA*t*a*c*a*t*t*t*c*t*a*meCmeA*meGmeC*meT | |
| | | | 939 | mA*fC*mGfCmAfCmAfCmGfGmCfCmUfUmCfGmUfCmGfC*mC*LA | 22 |
| AC1-L9V3 | ACO | n/a | 953 | UUGUAUUCUAUGUU | 14 |
| ACI(me14)-L9V3 | ACO | n/a | 954 | S9- | 14 |
| | | | | meU*meU*meG*meU*meA*meU*meU*meC*meU*meA*meU*meG*meU*meU | |
| DS17-04M3(Scr)-AC1(me14)- | ODV- | n/a | 955 | fC*mG*fGmUfGmGfAmGfGfCfCfUfGmGfCmGfCmA*fA*mU-S9- | 34 |
| | scrambled | | | meU*meU*meG*meU*meA*meU*meU*meC*meU*meA*meU*meG*meU*meU | |
| L9V3 | duplex | | 956 | mG*fC*mCfAmCfCmUfCmCfGmGfAmCfCmGfCmGfUmUfA*mC*fA | 22 |
| | control | | | | |
| dsCon2M3-AC1(me14)-L9V3 | ODV-control | n/a | 957 | mG*fA*mCfUmAfCmUfGmAfGfUfGmAfCmAfGmUfA*mG*fA-S9- | 34 |
| | duplex | | | meU*meU*meG*meU*meA*meU*meU*meC*meU*meA*meU*meG*meU*meU | |
| | | | 958 | mU*fC*mUfAmCfUmGfUmCfAmCfUmCfAmGfUmAfGmUfC*mG*fU | 22 |
| DS17-Vo149 | siRNA | SOD1 | 959 | AUGGCGACGAAGGCCGUGU | 19 |
| | | | 960 | ACACGGCCUUCGUCGCCAU | 19 |
| DS17-Vo149(c) | siRNA | SOD1 | 961 | AUGGCGACGAAGGCCGUGCdTdT | 21 |
| | | | 962 | UCACGGCCUUCGUCGCCAUdTdT | 21 |
| DS17-Vo153 | siRNA | SOD1 | 963 | CGACGAAGGCCGUGUGCGU | 19 |
| | | | 964 | ACGCACACGGCCUUCGUCG | 19 |
| DS17-Vo153(c) | siRNA | SOD1 | 965 | CGACGAAGGCCGUGUGCGCdTdT | 23 |
| | | | 966 | UCGCACACGGCCUUCGUCGdTdT | 23 |
| DS17-A1289 | siRNA | SOD1 | 967 | GUGGCCGAUGUGUCUAUUGAAGA | 23 |
| | | | 968 | UCUUCAAUAGACACAUCGGCCAC | 23 |
| DS17-A1102 | siRNA | SOD1 | 969 | GUGGGGAAGCAUUAAAGGACUGA | 23 |
| | | | 970 | UCAGUCCUUUAAUGCUUCCCCAC | 23 |
| DS17-Vo195&60 | siRNA | SOD1 | 971 | AGGGCAUCAUCAAUUUCGA | 20 |
| | | | 972 | UCGAAAUUGAUGAUGCCCU | 20 |
| DS17-Vo195(D-2763) | siRNA | SOD1 | 973 | AGGGCAUCAUCAAUUUCGCATdT | 21 |
| | | | 974 | UCGAAAUUGAUGAUGCCCUdTdT | 21 |
| DS17-A1148 | siRNA | SOD1 | 945 | UGCAGGGCAUCAUCAAUUU | 20 |
| | | | 946 | AAAUUGAUGAUGCCCUGCA | 19 |
| DS17-A1194 | siRNA | SOD1 | 69 | AGGGCAUCAUCAAUUUCGA | 19 |
| | | | 71 | UCGAAAUUGAUGAUGCCCU | 19 |
| DS17-A1290 | siRNA | SOD1 | 73 | GCAGGGCAUCAUCAAUUUC | 20 |
| | | | 75 | GAAAUUGAUGAUGCCCUGC | 19 |
| DS17-A1405 | siRNA | SOD1 | 77 | CCAGUGCAGGGCAUCAUCA | 20 |
| | | | 79 | UGAUGAUGCCCUGCACUGG | 19 |
| DS17-A1447 | siRNA | SOD1 | 81 | AUCAUCAAUUUCGAGCAGA | 19 |
| | | | 83 | UCUGCUCGAAAUUGAUGAU | 19 |
| DS17-A1600 | siRNA | SOD1 | 85 | CAGGGCAUCAUCAAUUUCG | 19 |
| | | | 87 | CGAAAUUGAUGAUGCCCUG | 19 |

n.b.: Uppercase, RNA; Lowercase, DNA; *, phosphorothioate (PS) backbone modification; f, 2′-fluoro; m, 2′-O-methyl (2′-OMe); me, 2′-O-methoxyethyl (2′MOE); p, 5′-phosphate; C, 5′ methyl cytosine; U, 5′-methyl uracil; c, 5′ methyl cytosine; VP, 5′-(E)-vinylphosphonate; S9, Spacer-9 linker.

### RT-qPCR

### One-Step Reverse Transcription-Quantitative Polymerase Chain Reaction (One-Step RT-qPCR)

[0526] At the end of transfection, medium was discarded, and cells were washed with 150 μL of PBS once per well. After discarding the PBS, 100 μL of cell lysis was added into each well and incubated at room temperature for 5 min. 0.5 μL of the cell lysis was taken from each well and analyzed by RT-qPCR using One Step TB Green™ PrimeScrip™ RT-PCR kit II (Takara, RR086A) in a Roche Lightcycler 480 real-time PCR machine PCR reactions was prepared using Echo 525 Acoustic Liquid Handler (Beckman Coulter). Each transfection sample was amplified in 3 repeat wells. PCR reaction conditions are shown in Table 9.

TABLE 9
PCR reaction preparation.

| Reagent | Volume (μL) |
|---|---|
| 2 × One Step TB Green RT-PCR buffer 4 | 2.5 |
| PrimeScript ™ 1 step enzyme Mix 2 | 0.2 |
| Forward and Reverse Primers Mix (5 μM) | 0.4 |
| dH₂O without RNase | 1.6 |
| Crude lysate (RNA) | 0.4 |
| Total volume | 5.1 |

[0527] The reaction conditions were as follows: reverse transcription reaction (stage 1). 42° C. for 5 min, 95° C. for 10 sec; PCR reaction (stage 2): 95° C. for 5 sec, 59° C. for 20 sec, 72° C. for 10 sec; 40 cycles of amplification; and melting curve (stage 3). Human or mouse SOD1 gene was amplified as target genes. TBP and HPRT1 were served as reference genes were also amplified as internal controls for RNA loading. All primer sequences are listed in Table 4 and Table 10.

TABLE 4
Primer sequences for RT-PCR.

| Primer | | SEQ | | Product size |
|---|---|---|---|---|
| Title | Gene | ID NO | Sequence (5′-3′) | (bp) |
| Htt F | Mouse Htt | 896 | GCACGGCATCCTCTATGTGT | 121 |
| Htt R | | 897 | AATGTTCACGCAGTGGGCTA | |
| App F | Mouse App | 898 | CGAGAGAGAATGTCCCAGGTC | 142 |
| App R | | 899 | TCTCATTGGCTGCTTCCTGT | |
| SOD1 F | Human | 900 | AAGCATTAAAGGACTGACTGAAGG | 154 |
| SOD1 R | SOD1 | 901 | CAAGTCTCCAACATGOCTCTC | |
| Sod1 F | Mouse Sod1 | 902 | GGACAATACACAAGGCTGTACC | 125 |
| Sodl R | | 903 | CGTCCTTTCCAGCAGTCACA | |
| SMN2FL F | Human | 904 | TCATACTGGCTATTATATGGGTTTT | 95 |
| SMN2FL R | SMN2 | 905 | TGCTCTATGCCAGCATTTCTC | |
| SMNΔ7 F | Human | 906 | GCTATTATATGGAAATGCTGGCATAG | 73 |
| SMNΔ7 R | SMN2 | 907 | TTCCAGATCTGTCTGATCGTTTCT | |
| TBP F | Human TBP | 908 | TGCTCACCCACCAACAATTTAG | 139 |
| TBP R | | 909 | TCTGCTCTGACTTTAGCACCTG | |
| Tbp F | Mouse Tbp | 910 | GCTCTGGAATTGTACCGCAG | 126 |
| Tbp R | | 911 | CTGCAGCAAATCGCTTGGGA | |

TABLE 10
Primer sequences for RT-qPCR.

| | | SEQ | | Product |
|---|---|---|---|---|
| Primer | Gene | ID NO | Sequence (5′-3′) | size (bp) |
| SOD1 F | Human SOD1 | 900 | AAGCATTAAAGGACTGACTGAAGG | 154 |
| SOD1 R | | 901 | CAAGTCTCCAACATGCCTCTC | |
| Sod1 F | Mouse Sod1 | 902 | GGACAATACACAAGGCTGTACC | 125 |
| Sod1 R | | 903 | CGTCCTTTCCAGCAGTCACA | |
| TBP F | Human TBP | 908 | TGCTCACCCACCAACAATTTAG | 139 |
| TBP R | | 909 | TCTGCTCTGACTTTAGCACCTG | |
| HPRT1 F | Human | 23 | AAAGATGGTCAAGGTCGCAAG | 120 |
| HPRT1 R | HPRT1 | 29 | TAGTCAAGGGCATATCCTACAAC | |
| Tbp F | Mouse Thp | 910 | GCTCTGGAATTGTACCGCAG | 126 |
| Tbp R | | 911 | CTGCAGCAAATCGCTTGGGA | |
| R17-04-AS- | / | 33 | GTCGTATCCAGTGCAGGGTCCGAGG | 1 |
| SL-RT | | | TATTCGCACTGGATACGACTGGCGA | |
| R17-04-AS- | | 35 | atttaACGCACACGGCCTTC | 60 |
| SL-F2 | | | | |
| SL-RT- | | 37 | GTGCAGGGTCCGAGGT | |
| qPCR-Uni- | | | | |
| R1 | | | | |
| olMR0113 | / | 55 | CATCAGCCCTAATCCATCTGA | 236 |
| olMR0114 | | 356 | CGCGACTAACAATCAAAGTGA | |
| olMR7338 | / | 625 | CTAGGCCACAGAATTGAAAGATCT | 324 |
| olMR7339 | | 894 | GTAGGTGGAAATTCTAGCATCATCC | |

### Two Step RT-qPCR

[0528] For the sake of quantifying mRNA expression in cells, total cellular RNA was isolated from treated cells using a RNeasy Plus Mini kit (Qiagen, Hilden, Germany) according to its manual. The resultant RNA (1 g) was reverse transcribed into cDNA by using a PrimeScript RT kit containing gDNA Eraser (Takara, Shlga, Japan). The resultant cDNA was amplified in a Roche LightCycler 480 Multiwell Plate 384 (Roche, ref: 4729749001, US) using SYBR Premix Ex Taq 11 (Takara, Shlga, Japan) reagents and primers which specifically amplified target genes of interest. Reaction conditions were as follows: reverse transcription reaction (stage 1): 42° C. for 5 min, 95° C. for 10 sec; PCR reaction (stage 2): 95° C. for 5 sec, 60° C. for 30 sec, 72° C. for 10 sec; 40 cycles of amplification; Melting curve (stage 3). PCR reaction conditions are shown in Table 11 and Table 12.

TABLE 11
RT reaction

| | Volume (μL) |
|---|---|
| Reaction-1 (Takara, RR047A) | |
| 5 × gDNA Eraser Buffer | 2 |
| gDNA Eraser | 1 |
| Total RNA (1 μg) + RNase Free dH₂O | 7 |
| Total Volume | 10 |
| 42° C. 5 min, store at 4° C. | |
| Reagent-2 (Takara, RR047A) | |
| 5 × PrimeScript Buffer2 | 4 |
| PrimeScript RT Enzyme Mix I | 1 |
| RT Prime Mix | 1 |
| RNase free dH₂O | 4 |
| Reaction-1 | 10 |
| Total Volume | 20 |

37° C. 15 min, 85° C. 5 sec, store at 4° C.

TABLE 12
RT-qPCR reaction

| Reagent (Takara, RR820A) | Volume (μL) |
|---|---|
| SYBR Premix Ex Taq II (2×) | 5 |
| PCR Primer (forward + reverse) 5 μM | 1 |
| cDNA (RT product) | 4 |
| Total | 10 |

[0529] To calculate the expression level (Erel) of SOD1 mRNA in an siRNA-transfected sample relative to control treatment (Mock), the Ct values of the target gene and the two internal reference genes were substituted into formula III,

$$( formula III )$$

$${E}_{rel} = 2 ( CtTm - CtTs ) / ( ( 2 ( CtR 1 m - CtR 1 ) s * 2 ( CtR 2 m - CtR 2 ) ( 1 / 2 ) s ) )$$

[0530] wherein CtTₘ was the Ct value of the target gene from the mock-treated sample; CtTₛ was the Ct value of the target gene from the siRNA-treated sample, (CtR1ₘ was the Ct value of the internal reference gene 1 from the mock-treated sample; CtR1ₛ was the Ct value of the internal reference gene 1 from the siRNA-treated sample; CtR2ₘ was the Ct value of the internal reference gene 2 from the mock-treated sample, and CtR2ₛ was the Ct value of the internal reference gene 2 from the siRNA-treated sample.

### Primary Mouse Hepatocyte (PMH) Isolation and Free Uptake Assay

[0531] C57BL/6J mice (Beijing Vital River Laboratory Animal Technology Co., Ltd.) were anesthetized with isoflurane and perfused by initial flushing reagent and digestion reagent successively, followed by placing liver into 10 cm dish containing culture medium. Teared apart the lobes of the liver using two pairs of forceps and obtained the suspension to filter through a 70-75-micron membrane for collecting the cell suspension in 50 mL conical tube. Then, spined at 4° C. for 2 minutes at 100×g in a swinging-arm centrifuge and removed the supernatant and pipetted 20 mL cold PBS to wash cells (Repeat wash for a total of two times). Tested the cell viability using 0.4% trypan blue and seeded cell to the cell culture plates which coated collagen 14˜12 hours before cell seeding to make sure at least 60% cell confluence in culture medium. Make sure all cells grow to their full size and yield a final confluence of 90-95% after seeding cell to carry out the experiment.

### ELISA Assay

[0532] To assess immunostimulatory activity of oligonucleotides, ICR mice (Code ID: 201, Beijing Vital River Laboratory Animal Technology Co., Ltd.) were treated by DS17-04M3, AC1-L9V3 and DS17-04M3-AC1(me14)-L9V3 and mouse IL-1β, TNF-α IFN-γ protein expression levels was detected in the serum of treated mice OD value using IL-1β (70-EK201B/3-96, MULTI SCIENCES, China), TNF-α (1217202, Shanghai, China) and IFN-γ (70-EK280/3-96, 70-EK280/3-96, China) ELISA kits by following the instructions provided by the manufacturer of the kits. To test the toxicity after stimulation of oligonucleotides, the serum of ICR mice was harvested and detected the enzyme activity of Alanine transaminase (ALT), aspartate transaminase (AST), and Creatinine (CREA) using AL T kit (OSR6107, Beckman Coulter, US), AST kit (OSR6209, Beckman Coulter, US), and CREA kit (OSR6212, Beckman Coulter, US) by AU480 Chemistry Analyzer (Beckman Coulter, US), respectively, according to the instructions of the kits.

### Immunoblot Analysis

[0533] Total cellular protein samples were harvested using RIPA Buffer supplemented with protease inhibitors. Sample concentrations were accessed by the BCA protein assay kit (Beyotime, P0010, Shanghai, China). Protein aliquots (10 ug/well) were resolved via sodium dodecyl sulfate (SDS) polyacrylamide gel electrophoresis (PAGE) and transferred to 0.45 μm polyvinylidene difluoride (PVDF) membranes for immunodetection. Diluted primary antibodies specific to SMN (CST, 19276, USA) or α/β-Tubulin (CST, 2148s, USA) were incubated at 4° C. overnight. Corresponding species-specific anti-IgG horseradish peroxidase secondary antibodies (CST, 7074s and 7076s, USA) were used to visualize protein bands via chemiluminescence on an Image Lab docking station (BIO-RAD, Chemistry Doc MP Imaging System). Protein levels were quantified by optical densitometry of detected bands using ImageJ software.

### Propidium Iodide (P) Staining

[0534] HEK293A cells were cultured in 96-well plates following siRNA treatment for 24 hours. Cells were washed with cold PBS and lysed using 40 μL/well of Cell Lysis Buffer (0.25% Igeal CA-630, 140 mM NaCl, 2 mM DTT, 10 mM Tris, pH 7.4) containing 1.5 μM PI. Plates were incubated on ice for 5 minutes prior to measuring optical density (OD) on a microplate reader system (Infinite M2000 Pro) at 535 nm excitation and 615 nm emission wavelengths.

### Stem-Loop RT-qPCR

[0535] To quantify oligonucleotides in biological samples, animal tissues were harvested using Heat-Lysis method and stored lysate at −80° C. Duplex, antisense strand and formulated siRNAs (20 μM) were used for the preparation of serial 10-fold dilutions into 95° C. boiled tissue (100 mg/mL) or plasma (1:10 diluted) in 1× lysis buffer. Concentrations in nM were converted to ng/mL using the corresponding siRNAs molecular weights. Two non-template controls were included in all experiments. The first control contains the water used to prepare the transcription master mix and the second contains the lysis buffer used as diluent for samples and standards.

[0536] Reverse transcription reactions were performed using a Takara Reverse Transcription kit (Takara, RR037A). A total of 4 μl of cDNA (1:40 dilution) from the previous step was added into the PCR amplification reaction mix (0.5 μM forward primer, 0.5 μM reverse primer, 2×TG Green premix Ex Taq II). The qPCR reaction was run with the option ‘Standard Curve’ in a Light cycler 480. Stem-loop RT-qPCR reaction conditions are shown in Table 13 and Table 14.

TABLE 13
Stem-loop RT reaction

| Reagent (RR037A, Takara) | Volume(μL) | Program |
|---|---|---|
| 5x PrimeScript Buffer | 2 | 16° C. 30 min |
| PrimeScript RT Enzyme Mix I | 0.5 | 42° C. 30 min |
| SL RT primer (1 μM) | 0.5 | 85° C. 5 min |
| RNA/lysate | 1 | Hold at 4° C. as needed |
| RNase free H₂O | 6 | |
| Total volume | 10 | |

TABLE 14
Stem-loop RT-qPCR reaction

| Reagent (RR820A, Takara) | Volume(μL) | Program | |
|---|---|---|---|
| 2 x TB Green premix Ex TaqII | 5 | 95° C. 30 s | 1 cycle |
| Forward primer (10 μM) | 0.5 | 95° C. 5 s | 40 cycles |
| Uni-R primer (10 μM) | 0.5 | 60° C. 20 s | |
| RT product (1:40) | 4 | 72° C. 10 s | |

| | | |
|---|---|---|
| Total volume | 10 | Melting curve |

### Animal Procedures

[0537] All animal procedures were conducted by certified laboratory personnel using protocols consistent with local and state regulations and approved by the Institutional Animal Care and Use Committee. Initial breeding pairs of SMA mice were obtained from Jackson Laboratories (Bar Harbor, ME, USA). This model was created by integration of human SMN2 transgene to compensate for homozygous knock-out of mouse Smn gene (Hsieh-L1 et al. 2000). Tail snips were gathered at postnatal day 0 (PND 0) for genotyping by PCR and grouped as Type I SMA mice (Smn^{-/-}, SMN2^{+/-}), Type 111 SMA mice (Snm^{-/-}, SMN2^{+/+}), and heterozygous (Het) controls (Smn, SMN2^{+/-}). C57BL/6 mice were purchased from JOINN Biologics (Suzhou, Jiangsu, China). Bilateral intracerebral ventricle (ICV) injection was performed under anesthesia via 2% isoflurane at a depth of 1.5 mm or 3.6 mm with 29-gauge syringe for pup (2 μL for each side) and adult mice (5 μL for each side), respectively Subcutaneous (SC) injections were placed under the skin in the intrascapular area of pup and adult mice.

### Intracerebral Ventricle (ICV) Injection

[0538] Animals were anesthetized by isoflurane inhalation. The eyes of the animal were treated with ocular lubricant. The fur of the scalps and anterior backs were clipped and placed in a stereotaxic apparatus. Buprenorphine was administered subcutaneously prior to incision (0.1 mg/kg). An 1.5-cm, slightly off-center incision was made in the scalp A 25-gauge needle attached to a Hamilton syringe was placed at bregma level and the needle was then moved to the appropriate anterior/posterior and medial/lateral coordinates (0.2 mm anterior/posterior and 1 mm to the right medial/lateral). The proper amount of injection solution was injected at rates of approximately 1 μl/second for a total of 10 μL. This flow rate has been shown to deliver sufficient compound with consistency and no side effect to the animal. The incision was sutured closed using 1 horizontal mattress stitch with 5-0 absorbable suture.

### Intratracheal Instillation (ITI) Injection

[0539] Animals were anesthetized by avertin and individually secured on an inclined wood platform. The trachea was exposed by a 1-cm incision on the ventral neck skin. The test articles were dissolved in 50 μL saline and then directly instilled the solution into lung via endotracheal intubation with an 18-gauge plastic catheter. To ensure that the articles was delivered into the mice lung and provided an effective distribution, 150 μL pre-filled air was rapidly pushed into lung via a 1-mL syringe with the blunted needle after instilling the article solution. The catheter without syringe was placed in the trachea of mice to assist breathing. The incision of neck was sutured and swabbed with povidone iodine. The mice were placed on the inclined wood platform for 4 hours by anesthetizing with avertin until the article solution fully absorbed in lung. The saline group were performed same surgical procedure served as a vehicle control.

### Rotarod Behavior Test

[0540] To assess the motor coordination, strength and balance of SOD1^{G93A} mice after dosing Tofersen and DS17-04M3-AC1(me14)-L9V3 on PND 46, SOD1^{G93A} mice were tested on Rotarod device (XR-6C, Shanghai Xin Run Information Technology Co., LTD, China) 1-2 times per week. SOD1^{G93A} mice were trained on Rotarod device as follows. 1) The first speed was set 5 revolutions per minute (rpm) and a duration time at 5 seconds. 2) The second speed was set at 20 rpm and a duration time at 100 seconds 3) The third speed was set at 25 rpm and a duration time at 100 seconds. 4) The fourth speed was set at 30 rpm and a duration time at 100 seconds. 5) The fifth speed was set at 20 rpm and a duration time at 300 seconds. SOD1^{G93A} mice were trained until they could remain on the apparatus for 300 seconds without falling. After training, SOD1^{G93A} mice were placed on the rotarod with an accelerating mode (5 to 30 rpm in 5 min) for a maximum time of 300 seconds. SOD1^{G93A} mice were given three trails with an intertrial interval of 30 min and recorded the average time spent on the rotarod.

[0541] It has been discovered in this disclosure that after being introduced into a cell, the siRNA can effectively decrease the expression level of SOD1 mRNA and SOD1 protein. The present application will be further illustrated with reference to specific examples and drawings below. It should be understood that these examples are merely intended to illustrate the present application rather than limit the scope of the present application. In the following examples, study methods without specific conditions were generally in accordance with conventional conditions, such as conditions described in Sambrook, et al., Molecular Cloning: Laboratory Manual (New York: Cold Spring Harbor Laboratory Press, 1989), or conditions recommended by the manufacturer.

### In Vivo Imaging of Fluorescein Labeled Oligonucleotide in Animal Organs

[0542] Mice were terminally anesthetized on select days following treatment and perfused with cold PBS to wash out residual Quasar 570 (Qu5) dye in circulation. Major organs/tissues (i.e., muscle, liver, lung, heart, kidney, spinal cord, and specified areas of the brain) were harvested and imaged on an IVIS (in vivo imaging system) system at excitation/emission wavelengths of 520/570 nm. Quasar 570 signal was quantified by encircling each tissue or organ within a standardized region of interest (ROI) and measuring fluorescence intensity (p/s/cm2/sr) via Living Image® software (Caliper Life Science, USA).

### EXAMPLES

[0543] The following examples are set forth so as to provide those of ordinary skill in the art with a complete disclosure and description of how to make and use the present invention and are not intended to limit the scope of what the inventors regard as their invention nor are they intended to represent that the experiments below are all or the only experiments performed. Efforts have been made to ensure accuracy with respect to numbers used (e.g., amounts, temperature, etc.) but some experimental errors and deviations should be accounted for Unless indicated otherwise, parts are parts by weight, molecular weight is weight average molecular weight, temperature is in degrees Celsius, and pressure is at or near atmospheric. Standard abbreviations may be used, e.g., bp, base pair(s); kb, kilobase(s); pl, picoliter(s); s or sec, second(s); min, minute(s); h or hr, hour(s); aa, amino acid(s); nt, nucleotide(s); i.m., intramuscular(ly); i.p., intraperitoneal(ly); s.c., subcutaneous(ly), i.e.v, or icv or ICV, intracerebroventricular and the like.

### Example 1: Design and Synthesis of ODV Duplexes

[0544] All single-stranded oligonucleotide sequences with chemical modifications including nucleic acid analogs, backbone substitutions, linkers, and ACO conjugates were synthesized on solid-support as single molecular entities. ODV duplexes were subsequently created by annealing complimentary single-stranded oligonucleotides. FIG. 1 illustrates example molecular structures of ODV duplexes after annealing. Quality control of synthesis was performed on purified duplexes using mass spectroscopy and RP-HPLC. FIG. 2 shows the mass spectrograms and elusion profiles of example ODV duplexes with ACOs at 6 (siSOD1M2-AC2(N6)-S1V3v) or 22 nucleotides (siSOD1M2-AC2(N22)-S1V3v) tethered by a Spacer 18 linker (hexaethylene glycol). The spectrum data confirms on-support synthesis of both ODV-siRNAs was efficient and complete with observed MW of 9411.5 Da (calculated MW 9410.86 Da) and 14884.8 Da (calculated MW 14883.05 Da), respectively. In comparison, the same siRNA duplexes without ACOs had an observed MW of 7065.1 Da (calculated MW 7065.08 Da) without the S18 linker (siSOD1-388-E) and an observed MW of 7409.3 Da (calculated MW 7409.38 Da) with S18 (siSOD1M2-L1). RP-HPLC analytics also confirm ODV processing after synthesis yielded relatively pure duplexes as elusion profiles contain single peaks at ˜11 mins (FIG. 2).

### Example 2: ODV-siRNA Inhibits Htt mRNA Expression in Mouse Brain and Spinal Cord

[0545] Using medicinal chemistry, a fully-modified siRNA duplex was synthesized with knockdown activity targeting the mouse Htt transcript (siHTT-S1V1). The chemistry provided benefits needed for in vivo function (e.g., prolonged stability and elimination of immune stimulation), but still failed to demonstrate any significant response in vivo following local injection into the CNS. In an attempt to improve local diffusion and in vivo activity, an ODV variant (siHTT-AC2-S1L1) linked to an 18-mer ACO possessing 2′MOE and PS chemistry at every position was synthesized. Both siHTT-S1V1 and siHTT-AC2-S1L1 were injected into PND4 C57BL/6 pup mice. Brain and spinal cord were harvested 72 h later from the injected mice and Htt expression was detected from the harvested tissue after RNA isolation and RT reaction. As shown in FIG. 3A-B, ICV injection of siHTT-S1V1 did not significantly impact Htt expression in the brain or spinal cord compared to saline controls 3 days following treatment. However, siHTT-AC2-S1L1 reduced target gene expression by approximate 37% and 30% in the brain and spinal cord, respectively. This data provides evidence that the ODV strategy can endow siRNA with in vivo activity in the CNS via local injection

### Example 3: ODV does not Interfere with siRNA Knockdown Activity In Vitro

[0546] To test the impact ODV design has on siRNA knockdown activity, a series of ODV-siRNA variants with ACOs of different sizes (i.e., 12, 15, or 18 nucleotides in length) denoted as AC2(N12), AC2(N15) and AC2(N18), respectively were synthesized (Table 2). All ACOs were linked to the 3′-terminus of the passenger strand within a parental duplex siApp-8-S1V1v; a medicinally modified version of siAPP-8 with chemistry throughout. As shown in FIG. 4, siRNA knockdown activity was not impaired by ACO addition regardless of length.

[0547] Reduction in App mRNA levels ranged between 95-83% at 1 nM and 90-95% at 10 nM treatments in NSC-34 cells for all variants.

### Example 4: ODV-siRNA Possesses In Vivo Activity in the CNS

[0548] In vivo knockdown of App mRNA in CNS tissue was evaluated in C57BL/6 pup mice (PND4) via ICV injection. As shown in FIG. 5, siRNA without ACO (App-8-S1V1v) had no detectable impact on App levels in either brain or spinal cord tissue 3 days following injection. In contrast, both ODV variants siApp-8-AC2(N15)-S1L1V3v and siApp-8-AC2(N18)-S1L1V3v caused greater than 60% and 25% reductions in App mRNA within the brain and spinal cord, respectively. This data provides additional evidence that ODV-siRNA possesses in vivo activity in the CNS via local injection.

### Example 5: ODV Composition does not Interfere with In Vitro Activity of saRNA in Inducing Gene Activation

[0549] To test the impact ODV design has on saRNA activity, a series of ODV-saRNA variants with ACOs ranging in size from 8 to 18 nucleotides in length [denoted as AC2(8)-AC2(18)] were synthesized (Table 2). All ACOs were linked to the 3′-terminus of the passenger strand of R6-04(20)-S1V1v(CM-4); a medicinally modified saRNA that activates human SMN2 gene expression. Primary human fibroblasts derived from SMA Type-2 (GM03813 cells) and SMA Type-1 (GM09677 cells) patients were transfected with each ODV-saRNA and expression levels of fill length (SMN2FL) and Δ7 (SMV2Δ7) splicing variants were evaluated by RT-qPCR. Only SMN2FL transcript is responsible for producing functional SMN protein, while Δ7 is translated into a non-functional protein susceptible to rapid turnover. As shown in FIG. 6A-B, all ODV-saRNAs increased gene expression similar to R6-04(20)-S1V1v(CM-4) in both GM03813 and GM09677 cells. Immunoblot analysis also showed a measurable increase in full-length SMN protein in most all treatments, although, protein increases were only subtle at day 3 in GM09677 cells (FIG. 7A-B). Much like siRNA, ACOs of various length do not have a significant deleterious effect on saRNA activity.

[0550] To determine if ODV-saRNA activity is also conserved in context to human SMN2 transgene upregulation, primary mouse hepatocytes (PMH) derived from the Type III SMA (Smn^{-/-}, SMWN2^{+/+}) mouse model were treated in Nitro and expression levels of full length (SMN2FL) and Δ7 (SAMN2Δ7) splicing variants were evaluated by RT-qPCR. As shown in FIG. 8, all ODV-saRNAs increased SMN2 transgene output similar to or better than R6-04(20)-S1V1v(CM-4) in PMH cells.

### Example 6: Design of ODV-siRNAs to Target SOD1 in the CNS

[0551] Sequence for human SOD1 transcript (NM_000454.5) was retrieved from the NCBI nucleotide database. It included a 465 bp open reading frame (ORF) located between nucleotides 78 and 542, which served as the template for siRNA design (Table 5).

TABLE 5
SOD1 cDNA sequence for siRNA design

| | Size | SEQ ID |
|---|---|---|
| SOD1 sequence (5′-3′) | (nt) | NO |
| atggcgacgaaggccgtgtgcgtgctgaagggcgacggcccagtgcagggcatcatcaatttcgagcag | 465 | 895 |
| aaggaaagtaatggaccagtgaaggtgtggggaagcattaaaggactgactgaaggcctgcatggattcc | | |
| atgttcatgagtttggagataatacagcaggctgtaccagtgcaggtcctcactttaatcctctatccagaaaa | | |
| cacggtgggccaaaggatgaagagaggcatgttggagacttgggcaatgtgactgctgacaaagatgctg | | |
| tggccgatgtgtctattgaagattctgtgatctcactctcaggagaccattgcatcattggccgcacactggtg | | |
| gtccatgaaaaagcagatgacttgggcaaaggtggaaatgaagaaagtacaaagacaggaaacgctgga | | |
| agtcgtttggcttgtggtgtaattgggatcgcccaataa | | |

[0552] A total of 268 siRNA duplexes were synthesized, each with a length of 19 base-pairs and a GC content of 35%-65% and with no more than 4 repetitive nucleotides (Table 3). HEK293A cells were treated with 0.1 nM and 10 nM of the siRNAs, 24 hours later, the knockdown activity was evaluated using RT-qPCR high throughput screening (HTS). SOD1 mRNA knockdown activity of each siRNA was plotted in FIG. 9. Out of the 268 siRNAs, 121 demonstrated almost complete knockdown activity in reducing SOD1 mRNA levels by more than 90%. As an indicator of potency, 69 (25.7%) and 15 (5.6%) siRNAs reduced SOD1 levels at the concentration of 0.1 nM by over 50% and 75%, respectively. Both criteria allowed for the identification of the top 30 performing siRNAs in which complete dose response curves for SOD1 knockdown confirmed potencies (IC₅₀ values) in the low picomolar range (Table 6).

TABLE 6
Potency of the top 30 best performing SOD1 siRNAs
in knocking down SOD1 mRNA expression

| | SOD1 mRNA (% of Mock) | | |
|---|---|---|---|
| siRNA | 0.1 nM | 10 nM | IC₅₀ (pM) |
| siSOD1-63 | 20.67% | 2.76% | 1.99 |
| siSOD1-47 | 8.74% | 1.86% | 2.51 |
| siSOD1-104 | 13.49% | 1.63% | 3.32 |
| siSOD1-5 | 7.56% | 1.64% | 3.73 |
| siSOD1-258 | 17.26% | 1.62% | 3.74 |
| siSOD1-90 | 19.24% | 3.12% | 4.84 |
| siSOD1-10 | 24.35% | 3.22% | 4.96 |
| siSOD1-134 | 18.51% | 1.74% | 5.57 |
| siSOD1-8 | 23.88% | 2.58% | 5.75 |
| siSOD1-190 | 24.89% | 2.65% | 6.07 |
| siSOD1-254 | 14.03% | 2.31% | 7.00 |
| siSOD1-284 | 29.61% | 2.49% | 7.37 |
| siSOD1-184 | 19.34% | 2.14% | 7.75 |
| siSOD1-288 | 19.03% | 1.92% | 7.82 |
| siSOD1-98 | 21.99% | 2.56% | 9.40 |
| siSOD1-260 | 32.95% | 3.42% | 9.57 |
| siSOD1-129 | 27.72% | 1.79% | 9.71 |
| siSOD1-231 | 21.75% | 3.51% | 11.64 |
| siSOD1-287 | 33.25% | 5.41% | 12.82 |
| siSOD1-285 | 35.97% | 2.48% | 12.90 |
| siSOD1-156 | 24.60% | 2.42% | 13.72 |
| siSOD1-262 | 35.91% | 4.35% | 15.29 |
| siSOD1-388 | 28.77% | 4.20% | 16.27 |
| siSOD1-228 | 36.31% | 2.59% | 16.60 |
| siSOD1-241 | 19.30% | 1.85% | 20.30 |
| siSOD1-96 | 28.40% | 3.20% | 21.26 |
| siSOD1-229 | 27.59% | 4.57% | 22.74 |
| siSOD1-179 | 26.89% | 2.77% | 22.81 |
| siSOD1-242 | 28.51% | 3.92% | 24.47 |
| siSOD1-387 | 26.39% | 4.69% | 26.64 |

[0553] Subsequent analysis of cytotoxicity via PI staining was performed to further identify duplexes with potential safety concerns. As shown in FIG. 10, HEK293A cells tolerated doses at multiples well beyond 100×IC₅₀ values in context to SOD1 knockdown for the top 30 siRNAs. Overall, target sequence selection, siRNA design, and screening criteria identified a panel of strong candidates for further drug development.

[0554] In order to validate activity in model cell lines for neurodegenerative disorders (e.g., ALS), six siRNAs (i.e., siSOD1-63, siSOD1-47, siSOD1-104, siSOD1-5, siSOD1-231 and siSOD1-388) were selected from the top 30 and analyzed in the human neuroblastoma cell line, SH-SY5Y. FIG. 11 shows that knockdown activity was conserved for all six siRNAs reducing SOD1 levels by more than 75% at either 1 nM or 10 nM treatment concentrations. Knockdown was also validated in two motor neuron-like cell lines of mouse origin (i.e., NSC-32 and N-2a) for siRNAs with conserved target sequence in mouse Sod1 transcript (i.e., siSOD1-231, siSOD1-229, siSOD1-388, and siSOD1-387). As shown in FIG. 12A-B, reductions in mouse Sod1 levels were robust approaching near complete knockdown at 10 nM for all tested siRNAs. Based on this data, two exemplary siRNAs (i.e., siSOD1-231 and siSOD1-388) were selected for further development by applying medicinal chemistry.

[0555] Variants of siSOD1-231 and siSOD1-388 duplexes were synthesized using several different modification patterns comprised of phosphorothioate (PS) backbone substitutions and nucleic acid analogs (i.e., 2′fluoro, 2′-O-methyl, and DNA) in combination with duplex structure asymmetries (Table 2). FIG. 13A illustrates the different chemistries and structural modifications applied to both siRNAs using siSOD1-388 as model sequence. Knockdown activity in HEK293A cells revealed siSOD1-388 appeared to tolerate most of the modification patterns in comparison to unmodified duplex with only siSOD1-388-M1 having the most notable loss in activity; whereas, all chemically modified variants of siSOD1-231 were compromised at 1 nM treatments with siSOD1-231-E having the greatest impairment overall (FIG. 13B). This knockdown profile was also conserved in the mouse neuroepithelial cell line, NE-4C (FIG. 13C). Taken together, siSOD1-388-E was the best overall performer and selected for downstream ODV optimization. Interestingly, the same modification pattern used in siSOD1-231-E nearly abolished its knockdown activity (FIG. 13B-C) implying that the deleterious effects of chemistry are also contingent on duplex sequence.

[0556] An ODV example of siSOD1-388-E was subsequently created by adding a 5′-vinylphosphonate (5′-VP) to its guide strand and a 15 nucleotide ACO on the 3′-terminus of its passenger strand (Table 2). Qu5 fluorophore was conjugated to the ODV-siRNA (siSOD1M2-AC2(N15)-S1V3v-Qu5) and an ACO-absent variant (siSOD1M2-S1V1v-Qu5) to allow biodistribution analytics following injection into animals. Knockdown performance was confirmed by transfection into NSC-34 cells in which ACO addition had no impact on ODV-siRNA activity at 0.1 or 1 nM treatments in vitro (FIG. 14). Furthermore, neither the 5′VP modification nor Qu5-labelling impaired siSOD1M2-AC2(N15)-S1V3v-Qu5 or siSOD1M2-S1V1v-Qu5 in comparison to unmodified duplex (siSOD1-388-E) (FIG. 14). In vivo analysis in C57BL/6 pup mice (PND4) following treatment via ICV injection at day 3 revealed ODV-siRNA biodistribution signal was enriched across CNS tissue (i.e., brain and spinal cord) compared to siSOD1M2-S1V1v-Qu5 (FIG. 15A-B). Pup mice have an underdeveloped blood-brain barrier allowing for possible systemic exposure and diffusion to peripheral tissues. While both siSOD1M2-AC2(N15)-S1V3v-Qu5 and siSOD1M2-S1V1v-Qu5 were detected in liver and kidney (i.e., consistent with organ perfusion and clearance), the ODV-siRNA was selectively enriched in muscle and other peripheral tissues (albeit at a lower detectable signal) in pup mice (FIG. 15A-B). Analysis of in vivo knockdown activity revealed similar results in that both siSOD1M2-AC2(N15)-S1V3v-Qu5 and siSOD1M2-S1V1v-Qu5 reduced Sod1 levels across CNS tissue with ODV-siRNA providing better performance; however, only siSOD1M2-AC2(N15)-S1V3v-Qu5 activity was preferably detected in peripheral tissue (FIG. 15C). Collectively, this data supports ODV implementation enhances tissue diffusion and distribution, whereas such effects are typically not observed with standard siRNA design.

[0557] In adult animals, Qu5 signal was largely confined to the CNS following ICV injection at day 5 (FIG. 16A). Overall, siSOD1M2-AC2(N12)-S1V3v-Qu5 biodistribution was enriched over siSOD1M2-S1V1v-Qu5 in both brain and spinal cord tissue. Knockdown activity was also evaluated in several CNS tissues (i.e., prefrontal cortex [PFC], cerebellum, rest of brain [Brain], cervical [Spinal-C], thoracic [Spinal-T], and lumbar [Spinal-L]vertebrae) and peripheral tissues including muscle and kidney. As shown in FIG. 1613, knockdown was detected in all CNS tissues in which ODV-siRNA generally provided better performance. In summary, ODV design provided broader performance improvement across different CNS tissues following local delivery.

### Example 7: ODV Provides a Durable Response in the Cerebellum Tunable by ACO Length

[0558] ODV variants comprising ACOs with a length of 6 (siSOD1M2-AC2(N6)-S1V3v-Qu5) or 22 nucleotides (siSOD1M2-AC2(N22)-S1V3v-Qu5) were synthesized to evaluate knockdown kinetics in CNS (Table 2). Adult C57BL/6 mice were treated via ICV injection with each ODV-siRNA and Sod1 knockdown was quantified by RT-qPCR in tissues of the CNS (i.e., frontal cortex, cerebellum, rest of brain tissue, cervical, thoracic, and lumbar vertebrae) and liver at day 10 and 25 post-treatment. As shown in FIG. 17, knockdown was robust and sustained in the cerebellum maintaining an approximate 70% reduction in Sod1 mRNA levels at day 25 for both ODV-siRNA variants. However, knockdown activity at day 10 was broadly distributed throughout the CNS for siSOD1M2-AC2(N6)-S1V3v-Qu5, while predominantly focused in the cerebellum for siSOD1M2-AC2(N22)-S1V3v-Qu5. Distribution also appeared contained within the CNS as activity was nominal in the liver. This data indicates ODV, in general, provides a durable response primarily within the cerebellum; however, distribution to other tissues in the CNS may be affected by ACO length.

### Example 8. SiRNA Knockdown of Human SOD1 mRNA in HEK293A Cells

[0559] To verify knockdown of SOD1 mRNA, 6 siRNAs targeting the SOD1 transcript were transfected into HEK293A cells at 0.1 and 1 nM for 24 hours. As shown in FIG. 18, DS17-0001, DS17-0002, DS17-0003, DS17-0004, DS17-0005 and DS17-0029 reduced SOD) mRNA levels by 83%, 84%, 77%, 80%, 79% and 62% at 0.1 nM and 96%, 96%, 96%, 96%, 96% and 93% at 1 nM treatment, respectively. For each of the tested siRNAs, knockdown activity was dose-dependent resulting in partial knockdown (i.e., ˜62-83%) at 0.1 nM and near maximal activity (i.e., greater than 90%) at 1 nM treatments in HEK293A cells.

### Example 9. DS17-04N3 has Superior Knockdown Potency Compared to Exemplary siRNA Designs Disclosed in Prior Art

[0560] Knockdown activity of DS17-04N3 was compared to 6 other exemplary siRNA designs disclosed in prior art (i.e., DS17-Vo149, DS17-Vo149(c), DS17-Vo153, DS17-Vol 53(c), DS17-Al289, and DS17-Al102) (Table 8). All siRNAs targeted the same overlapping cognate sequence in the SOD1 transcript. SOD1 levels were assessed via RT-qPCR to quantify knockdown activity at each dose concentration (i.e., 0.004, 0.016, 0.063, 0.250, 1.000 and 4.000 nM) in HEK293A cells 24 hours after treatment. Plotting knockdown activity generated dose response curves in which IC₅₀ values (dotted line) were extrapolated to define potency for each of the tested siRNAs (FIG. 19). As shown in Table 15, DS17-04N3 was the most potent siRNA having the lowest IC₅₀ value at 0.05 nM. The other 6 siRNAs were ˜3- to 15-fold less potent than DS17-04N3 by comparison.

TABLE 15
IC₅₀ value of DS17-04N3 compared to 6
other exemplary siRNAs in HEK293A cells

| Duplex | IC₅₀ (nM) |
|---|---|
| DS17-04N3 | 0.050 |
| DS17-Vo149 | 0.745 |
| DS17-Vo149(c) | 0.445 |
| DS17-Vo153 | 0.236 |
| DS17-Vo153(c) | 0.153 |
| DS17-Al289 | 0.180 |
| DS17-Al102 | 0.640 |

### Example 10. DS17-02N3 Design has Superior Knockdown Activity in HeLa and HEK293A Cells

[0561] DS17-02N3 also shares a common target site in human SOD1 mRNA with 8 other siRNA duplexes disclosed in prior art (i.e., DS17-Vo195&60, DS17-Vo195 (D-2763), DS17-Al148, DS17-Al194, DS17-Al290, DS17-Al405, DS17-Al447, and DS17-Al600) (Table 8).

[0562] Knockdown activity was compared via RT-qPCR at escalating concentrations (i.e., 0.004, 0.016, 0.063, 0.250, 1.000 and 4.000 nM) to generate dose response curves in HeLa (FIG. 20A) and HEK293A (FIG. 20B) cells 24 hours after transfection. All siRNAs demonstrated dose-dependent knockdown and IC₅₀ values (dotted lines) were extrapolated to compare siRNA potency (FIG. 20A-B). As summarized in Table 16, DS17-02N3 had superior potency in comparison to the other siRNA designs with the lowest IC₅₀ values at 0.001 nM and 0.005 nM in HeLa and HEK293A cells, respectively.

TABLE 16
IC₅₀ comparison in HeLa and HEK293A cells of DS17-02N3
and 8 other siRNA duplexes disclosed in prior art.

| | IC₅₀ (nM) | IC₅₀ (nM) |
|---|---|---|
| Duplex | in HeLa | in HEK293A |
| DS17-Vo195&60 | 0.072 | 1.022 |
| DS17-Vo195(D-2763) | 0.971 | 5.736 |
| DS17-Al148 | 0.159 | 0.177 |
| DS17-Al194 | 0.018 | 0.021 |
| DS17-Al290 | 0.630 | 0.428 |
| DS17-Al405 | 0.070 | 0.272 |
| DS17-Al447 | 0.082 | 0.187 |
| DS17-Al600 | 0.199 | 0.455 |
| DS17-02N3 | 0.001 | 0.005 |

### Example 11. Chemical Modification of siRNA Provides Consistent and Potent Knockdown Activity in T98G and HEK293A Cells

[0563] Chemically modified variants of DS17-0001, DS17-0002, DS17-0003, DS17-0004, and DS17-0005 were synthesized by implementing a consensus modification pattern and applying the same structural designs used in both DS17-04N3 and DS17-02N3. The sequence of these variants are listed in Table 8. Knockdown activity of each siRNA variant (i.e., DS17-01M3, DS17-02M3, DS17-03M3, DS17-04M3, and DS17-05M3) (Table 8) was assessed via RT-qPCR at escalating concentrations (i.e., 0.002, 0.005, 0.015, 0.046, 0.137, 0.412, 1.235, 3.704, 11.111, 33.333 and 100 nM) to generate dose response curves in T98G (FIG. 21A) and HEK293A (FIG. 21B) cells 24 hours after transfection. In both cell lines, SOD1 knockdown was concentration dependent with IC₅₀ values in the lower picomolar range (i.e., less than ˜30 pM) for each of the tested siRNA duplexes. As summarized in Table 17, both DS17-04M3 and DS17-05M3 had similar potencies with IC₅₀ extrapolations equaling 0.008 nM in T98G cells, while DS17-03M3 was marginally the more potent siRNA in HEK293A cells with an IC₅₀ of 0.015 nM

TABLE 17
IC₅₀ values for SOD1 knockdown by chemically
modified siRNAs in T98G and HEK293A cells.

| | IC₅₀ (nM) | IC₅₀ (nM) |
|---|---|---|
| Chemically modified siRNA | in T98G | in HEK293A |
| DS17-01M3 | 0.018 | 0.029 |
| DS17-02M3 | 0.022 | 0.028 |
| DS17-03M3 | 0.022 | 0.015 |
| DS17-04M3 | 0.008 | 0.027 |
| DS17-05M3 | 0.008 | 0.028 |

### Example 12. Assessment of SOD1 Knockdown Activity and Safety of ODV-siRNAs in HEK293A Cells

[0564] ODV variants of DS17-02M3, DS17-03M3, DS17-04M3, and DS17-29M3 were synthesized by conjugating a 14-nucleotide ACO onto the 3′-terminus of the passenger (sense) strand within each duplex (Table 8). SOD1 mRNA levels were quantified via RT-qPCR at escalating concentrations (i.e., 0.00002, 0.00009, 0.00037, 0.0015, 0.0059, 0.023, 0.094, 0.375, 1.5 and 6 nM) to generate dose response curves for each ODV-siRNA (i.e., DS17-02M3-AC1(me14)-L9V3, DS17-03M3-AC1(me14)-L9V3, DS17-04M3-AC1(me14)-L9V3, and DS17-29M2-AC1(me14)-L9V3) in HEK293A cells 24 hours after transfection. FIG. 22A indicates that SOD1 knockdown was dose-dependent for each ODV-siRNA with ICs, values in the higher picomolar range (i.e., 83-313 μM). Table 18 summarizes the potency of each ODV-siRNA with DS17-02M3-AC1(me14)-L9V3 having the lowest IC₅₀ value at 0.083 nM in HEK293A cells. Caspase 3/7 activity was also quantified to determine the induction of unwanted cytotoxicity as a marker of safety. As shown in FIG. 22B, caspase 3/7 activity was not detected at any of the tested dose concentrations up to 6 nM indicating that each ODV-siRNA was generally free of cytotoxic effects.

TABLE 18
IC₅₀ values of ODV-siRNAs in HEK293A cells.

| ODV-siRNA | IC₅₀ (nM) |
|---|---|
| DS17-02M3-AC1(me14)-L9V3 | 0.083 |
| DS17-03M3-AC1(me14)-L9V3 | 0.204 |
| DS17-04M3-AC1(me14)-L9V3 | 0.283 |
| DS17-29M2-AC1(me14)-L9V3 | 0.313 |

### Example 13. In Vivo Knockdown Activity of ODV-siRNAs in CNS Tissues of SOD1^{G93A} Mice

[0565] To test the knockdown activity in vivo, adult SOD1^{G93A} mice at PND 46 were treated via ICV injection with ODV-siRNA (i.e., DS17-01M3-AC1(me14)-L9V3, DS17-04M3-AC1(me14)-L9V3, or DS17-05M3-AC1(me14)-L9V3) at a total dose of 0.4 mg. A non-specific ODV-siRNA (i.e., dsCon2M3-AC1(me14)-L9V3) was used as a negative control, while treatment with an ASO identical in composition to the drug Toferson (BIIB067) served as a reference for SOD1 knockdown activity in vivo. All test articles were formulated in artificial CSF (aCSF) in which treatment with aCSF alone functioned as a procedural control to establish baseline expression in CNS tissues Mice were sacrificed on day 7 after treatment and CNS tissues from the brain (i.e., frontal cortex, cerebellum, and rest of brain tissue) and spinal cord (i.e., cervical, thoracic, and lumbar) were harvested for mRNA expression analysis via RT-qPCR.

[0566] As shown in FIG. 23A, Toferson decreased SOD1 levels in the frontal cortex, cerebellum, and the rest of brain tissue by 48%, 39%, and 53%, respectively, whereas DS17-04M3-AC1(me14)-L9V3 resulted in knockdown of 64%, 64%, and 58% in the same tissues. Knockdown by DS17-05M3-AC1(me14)-L9V3 was more modest measuring a respective decline by 21%, 46%, and 21% in SOD1 levels, while DS17-01M3-AC1(me14)-L9V3 measured a 20% knockdown only in the frontal cortex. Knockdown activity in tissues from the spinal cord followed a similar trend in which DS17-04M3-AC1(me14)-L9V3 had better overall activity provided a 70%, 70%, and 64% reduction in SOD levels in cervical, thoracic, and lumbar tissues, respectively (FIG. 23B). Collectively, data indicates that ODV-siRNA (e.g., DS17-04M3-AC1(me14)-L9V3) can knock down SOD1 across broad CNS tissues via ICV injection with activities similar to or better than Toferson.

### Example 14. Therapeutic Efficacy of ODV-siRNA in Adult SOD1^{G93A} Mice

[0567] Equal molar quantities (20 nmole) of DS17-04M3-AC1(me14)-L9V3 or Tofersen were administered in a single dose via ICV injection into adult SOD1^{G93A} mice on PND 46. Two parameters for the clinical phenotype of ALS including rotarod performance and body weight were measured ˜1-2 times per week (or as indicated) until PND 140 in order to evaluate therapeutic efficacy. As shown in FIG. 24A, disease onset was not detected until PND 120 via rotarod test in which only the DS17-04M3-AC1(me14)-L9V3 treatment group showed latency in disease progression up to PND 140 in comparison to aCSF control treatments. However, gains in body weight were substantially greater in animals treated with DS17-04M3-AC1(me14)-L9V3 or Tofersen compared to control animals (aCSF) up until PND 120 (FIG. 24B). Upon disease onset, weight loss was also offset by the higher peak body weights in both DS17-04M3-AC1(me14)-L9V3 and Toferson treatment groups with DS17-04M3-AC1(me14)-L9V3 providing a greater therapeutic effect (FIG. 24B). Only one animal death occurred at PND 139 in the control group, while all remaining animals were terminated at the end of the study on PND 140. Overall, the data shows that a single dose of ODV-siRNA (i.e., DS17-04M3-AC1(me14)-L9V3) has comparatively greater therapeutic efficacy than Toferson in SOD^{G93A} mice.

### Example 15. Pharmacokinetics in Brain Tissue from Adult SOD1^{G93A} Mice Following ODV-siRNA Treatment Via ICV Injection

[0568] Adult SOD1^{G93A} mice were treated with 0.4 mg DS17-04M3-AC1(me14)-L9V3 via ICV injection and brain tissues were harvested on day 1, 7, 28, or 56 after treatment. DS17-04M3-AC1(me14)-L9V3 was detected in the tissue preps by selectively amplifying its guide strand via primer-specific RT-qPCR. Concentrations in the cerebellum and cumulative brain tissue were plotted to evaluate pharmacokinetics (PK) FIG. 25 depicts DS17-04M3-AC1(me14)-L9V3 levels peaked at day 1 and maintained a steady state from day 7 to 56 Concentrations were estimated to be at 334, 66, 82 and 56 μg/g in the cerebellum and 418, 234, 135 and 164 μg/g in rest of brain tissue at day 1, 7, 28, and 56, respectively.

### Example 16. Dose-Dependent Knockdown of SOD1 by ODV-siRNA in Adult SOD1^{G93A} Mice

[0569] Dose response activity in the CNS was evaluated in adult SOD1^{G93A} mice following ICV injection of 0.1, 0.4, 1.0 or 1.6 mg DS17-04M3-AC1(me14)-L9V3. Mice were sacrificed 14 days after treatment in which brain (i.e., frontal cortex, cerebellum, and rest of brain tissues), spinal cord (i.e., cervical, thoracic, and lumbar), and peripheral (i.e., liver) tissues were harvested for expression analysis of SOD1 via RT-qPCR Treatment with aCSF alone served as a vehicle control to establish baseline expression levels. As shown in FIG. 26, SOD1 knockdown was dose-dependent, with its level decreased by ≥70% after 1.0 mg and 1.6 mg treatment in all CNS tissues, whereas the knockdown activity in the liver was substantially lower, resulting in a maximal SOD1 reduction of only ˜32% at the highest dose. Table 19 summarizes the mean knockdown activity of DS17-04M3-AC1(me14)-L9V3 in all evaluated tissues at the indicated doses. Overall, knockdown was well localized within the CNS in which drainage to peripheral tissue (i.e., liver) did not produce ample activity.

TABLE 19
Percent knockdown of SOD1 mRNA in mouse
CNS and liver tissues by ODV-siRNA.

Mean Knockdown (%)
DS17-04M3-AC1(me14)-L9V3

| Tissue | 0.1 mg | 0.4 mg | 1 mg | 1.6 mg |
|---|---|---|---|---|
| Brain-frontal cortex | 51 | 56 | 73 | 82 |
| Brain-cerebellum | 62 | 65 | 70 | 70 |
| Rest of brain | 64 | 77 | 82 | 88 |
| Spinal cord-cervical | 56 | 66 | 86 | 89 |
| Spinal cord-thoracic | 66 | 69 | 84 | 87 |
| Spinal cord-lumbar | 57 | 63 | 87 | 89 |
| Liver | 5 | 2 | 17 | 32 |

### Example 17. Enhancement of ODV-siRNA Potency with Chemical Modification at the 5′-Position in the Guide Strand

[0570] Vinylphosphonate (VP) modification at the 5′-position (5′VP) in the guide strand of ODV-siRNA was tested in vitro for impact on knockdown activity. SOD1 levels were quantified via RT-qPCR at escalating concentrations (i.e., 0.0003, 0.0011, 0.0044, 0.0176, 0.0703, 0.2813, 1.1250, 4.5 and 18 nM) to generate dose response curves for each 5′VP modified variant of ODV-siRNA (i.e., DS17-01M3v-AC1(me14)-L9V3, DS17-02M3v-AC1(me14)-L9V3, DS17-03M3v-AC1(me14)-L9V3, DS17-04M3v-AC1(me14)-L9V3 and DS17-05M3v-AC1(me14)-L9V3) in T98G cells 24 hours after transfection. FIG. 27 indicates that the 5′VP modification was well-tolerated in which SOD1 knockdown was concentration dependent for each ODV-siRNA with IC₅₀ values in the low picomolar range (i.e., 4-42 pM). Potency results are summarized in Table 20.

TABLE 20
IC₅₀ values of 5′VP-modified variants
of ODV-siRNAs in T98G cells.

| Duplex | IC₅₀ (nM) |
|---|---|
| DS17-01M3v-AC1(me14)-L9V3 | 0.019 |
| DS17-02M3v-AC1(me14)-L9V3 | 0.019 |
| DS17-03M3v-AC1(me14)-L9V3 | 0.013 |
| DS17-04M3v-AC1(me14)-L9V3 | 0.042 |
| DS17-05M3v-AC1(me14)-L9V3 | 0.004 |

### Example 18. In Vivo Knockdown Activity of 5′VP-Modified ODV-siRNAs in the CNS Tissues of SOD1^{G93A} Mice

[0571] To test the knockdown activity in vivo, adult SOD1^{G93A} mice at PND 46 were treated via ICV injection with 5′VP-modified ODV-siRNA (i.e., DS17-01M3v-AC1(me14)-L9V3, DS17-02M3v-AC1(me14)-L9V3, DS17-03M3v-AC1(me14)-L9V3, DS17-04M3v-AC1(me14)-L9V3 and DS17-05M3v-AC1(me14)-L9V3) at a total dose of 0.2 mg. A scrambled ODV-siRNA (i.e., DS17-04M3(Scr)-AC1(me14)-L9V3) was used as a non-specific control, while treatment with aCSF alone functioned as a vehicle control to establish baseline expression Mice were sacrificed on day 14 after treatment and tissues from the brain (i.e., cerebellum and rest of brain), spinal cord, and liver were harvested for mRNA expression analysis via RT-qPCR. As shown in FIG. 28, DS17-02M3v-AC1(me14)-L9V3 provided potent knockdown of SOD1 reducing mRNA levels by 85%. 78%, 90%, and 42% in the cerebellum, rest of brain, spinal cord, and liver, respectively. DS17-04M3v-AC1(me14)-L9V3 treatment also had substantial knockdown activity measuring reductions of 70%, 81%, 81%, and 9% in the same respective tissues. Knockdown by DS17-03M3v-AC1(me14)-L9V3 and DS17-05M3v-AC1(me14)-L9V3 was more modest causing SOD1 levels to decrease between 29-56% within CNS tissues, whereas DS17-01M3v-AC1(me14)-L9V3 only provided up to 13% knockdown at the 0.2 mg dose.

[0572] Direct comparison of knockdown activity by ODV-siRNA with (i.e., DS17-04M3v-AC1(me14)-L9V3) or without (i.e., DS17-04M3-AC1(me14)-L9V3) the 5′VP modification was also evaluated in tissues of the brain (i.e., frontal cortex, cerebellum, and rest of brain), spinal cord (i.e., cervical, thoracic, and lumbar), and periphery (i.e., liver). As shown in FIG. 29A-B, DS17-04M3v-AC1(me14)-L9V3 at both 0.2 and 0.4 mg doses had greater knockdown activity across all CNS tissues compared to its non-5′VP variant (i.e., DS17-04M3-AC1(me14)-L9V3) day 14 following treatment. This observation was further accentuated when evaluating knockdown activity at day 56 in which DS17-04M3v-AC1(me14)-L9V3 provided a much more durable response (FIG. 29C). In contrast, 5′VP modification did not appear to further exaggerate knockdown in the liver via CNS drainage suggesting 5′VP also improved the activity differential between local and peripheral tissue (FIG. 29A-C).

### Example 19. Potent and Durable Knockdown of SOD1 by ODV-siRNA in CNS Tissues of SOD1^{G93A} Mice

[0573] To further assess knockdown durability of ODV-siRNA in comparison to Toferson, adult SOD1^{G93A} mice at PND 46 were administered in a single dose via ICV injection equal molar quantities (20 nmole) of DS17-04M3-AC1(me14)-L9V3, DS17-04M3v-AC1(me14)-L9V3, or Toferson. All test articles were formulated in aCSF in which treatment of aCSF alone functioned as a vehicle control to establish baseline expression in isolated tissues. Mice were sacrificed on day 56 after treatment and tissues from the brain (i.e., frontal cortex, cerebellum, and rest of brain tissue), spinal cord (i.e., cervical, thoracic, and lumbar), and liver were harvested for SOD1 mRNA expression analysis via RT-qPCR.

[0574] As shown in FIG. 30A-F, 5′VP-modified ODV-siRNA (i.e., DS17-04M3v-AC1(me14)-L9V3) provided both the greatest maximal and most durable knockdown response in all CNS tissues reducing SOD1 levels by ˜68-81% and ˜53-69% at 2 and 8 weeks, respectively. Conversely, Toferson had the weakest activity at the 20 nmole dose in which maximal activity in its most responsive tissue (i.e., rest of brain) only measured 50% and 14% knockdown at 2 and 8 weeks, respectively (FIG. 30C). Expression analysis in the liver also revealed that knockdown was well localized within the CNS for all oligonucleotide treatments in which the 20 nmole dose did not produce ample activity via drainage to peripheral tissue at any time point (FIG. 30G). Overall, data indicates that both ODV-siRNA duplexes showed enhanced activity and durability for SOD1 knockdown compared to Toferson at an equivalent molar dose, while the 5′VP-modified variant had better potency and knockdown durability in vivo.

### Example 20. Acute Toxicity and Immunostimulatory Activity Assessment of SOD1 ODV-siRNA in ICR Mice

[0575] To assess in vivo safety, ICR mice approximately 6 weeks of age were treated via SC injection with equal molar quantities of ODV-siRNA (DS17-04M3-AC1(me14)-L9V3), siRNA without ACO conjugate (DS17-04M3), or ACO component alone (AC1-L9V3) at either 10.18 or 40.71 nmole to measure innate immunostimulation following systemic exposure to oligonucleotide treatment. Saline served as a vehicle control to establish baseline levels of cytokines in serum. Sequences for each oligonucleotide are listed in Table 8. Mice were sacrificed 8 hours after treatment and serum was harvested to detect IL-1β, IFN-γ, and TNF-α protein levels via ELISA. As shown in FIG. 31A-C, no significant change in any of the tested cytokines was detected compared to saline control. This data implies neither DS17-04M3-AC1(me14)-L9V3 nor any of its components (i.e., DS17-04M3 and AC1-L9V3) have immunostimulatory activity.

[0576] Serum markers for hepatic (i.e., ALT and AST) and renal (i.e., creatine) toxicity were also assessed in serum samples at 8 hours following SC injection. Levels of ALT (FIG. 32A) and AST (FIG. 32B) for all treatment groups were within the biochemical normal reference range and deviating from saline controls by less than 2-fold indicative of natural variability. Similarly, creatine (CREA) levels showed no significant change in comparison to saline treatment controls (FIG. 32C). This data indicates that no acute damage to the liver or kidney was detected following systemic exposure to DS17-04M3-AC1(me14)-L9V3 or any of its components (i.e., DS17-04M3 and AC1-L9V3).

### Example 21. Targeting the 3′UTR of Human SOD1 mRNA with siRNAs and Gapmer ASOs

[0577] To further expand the library of siRNAs, as well as identify novel ASOs beyond Toferson, sequence for human SOD1 mRNA (NM_000454.5) was retrieved from the NCBI database that included its 3′-untranslated region (3′UTR). An upstream portion of the 3′UTR located between nucleotide numbers 543-712 (from the first nucleotide of SOD1 3′ UTR to 170^{th} nucleotide in the 3′ UTR) (underlined) was used as a template for both siRNA and ASO design (Table 21).

TABLE 21
Human SOD1 3′UTR sequence used for siRNA and ASO design

| | Size | SEQ |
|---|---|---|
| Human SOD1 3′UTR sequence (5′-3′) | (nt) | ID NO |
| acattcccttggatgtagtctgaggccccttaactcatctgttatcctgctagctgtagaaatgtatcctg | 353 | 59 |
| ataaacattaaacactgtaatcttaaaagtgtaattgtgtgactttttcagagttgctttaaagtacctgtag | | |
| tgagaaactgatttatgatcacttggaagatttgtatagttttataaaactcagttaaaatgtctgtttcaat | | |
| gacctgtattttgccagacttaaatcacagatgggtattaaacttgtcagaatttctttgtcattcaagcct | | |
| gtgaataaaaaccctgtatggcacttattatgaggctattaaaagaatccaaattcaaactaaa | | |

[0578] A total of 46 siRNA duplexes were designed and synthesized with asymmetric overhangs having a GC content between 35-65% and no more than 4 repetitive nucleotides (Table 22). Knockdown activity was evaluated via RT-qPCR at both 0.1 and 1 nM concentrations in HEK293A cells 24 hours after transfection. Sorting knockdown data by target site location within the 3′UTR revealed two “hotspots” (referred to as H1 and H2) that contained a majority of the best performing siRNAs (FIG. 33A). H1 is a 14 bp nucleic acid region on the target sequence of the siRNAs, where the 5′-ends of the functional siRNAs are located at the region of 549 to 562, while H2 is a 13 bp nucleic acid region on the target sequence of the siRNAs, where the 5′-ends of the functional siRNAs are located in the region of nucleotide number 568 to 580 relative to the TSS (Table 23). Data ranked by knockdown activity is summarized in FIG. 33B in which the top 19 siRNAs reduced SOD1 levels by ≥45% and ≥70% at 0.1 and 1 nM treatments, respectively. Dose response curves were subsequently generated via RT-qPCR using 8 escalating concentrations (i.e., 0.001, 0.004, 0.016, 0.063, 0.250, 1, 4 and 16 nM) to characterize potency (FIG. 34). As summarized in Table 24, IC₅₀ values for the top 19 performers were all below 7 nM in HEK293A cells.

TABLE 22
siRNA duplex sequence targeting the 3′UTR of human SOD1 mRNA

| Oligo- | SEQ | | SEQ | | SEQ | |
|---|---|---|---|---|---|---|
| nucleotide | ID | Target sequence | ID | | ID | |
| name | NO | (5′-3′) | NO | Sense (5′-3′) | NO | Antisense (5′-3′) |
| siSOD1-547 | 1068 | tcagactacatccaagggaat | 976 | UCCCUUGGAUGUAGUCUGA | 1022 | UCAGACUACAUCCAAGGGAau |
| siSOD1-549 | 1069 | cctcagactacatccaaggga | 977 | CCUUGGAUGUAGUCUGAGG | 1023 | CCUCAGACUACAUCCAAGGga |
| siSOD1-553 | 1070 | ggggcctcagactacatccaa | 978 | GGAUGUAGUCUGAGGCCCC | 1024 | GGGGCCUCAGACUACAUCCaa |
| siSOD1-554 | 1071 | aggggcctcagactacatcca | 979 | GAUGUAGUCUGAGGCCCCU | 1025 | AGGGGCCUCAGACUACAUCca |
| siSOD1-556 | 1072 | taaggggcctcagactacatc | 980 | UGUAGUCUGAGGCCCCUUA | 1026 | UAAGGGGCCUCAGACUACAuc |
| siSOD1-557 | 1073 | ttaaggggcctcagactacat | 981 | GUAGUCUGAGGCCCCUUAA | 1027 | UUAAGGGGCCUCAGACUACau |
| siSOD1-561 | 1074 | tgagttaaggggcctcagact | 982 | UCUGAGGCCCCUUAACUCA | 1028 | UGAGUUAAGGGGCCUCAGAcu |
| siSOD1-562 | 1075 | atgagttaaggggcctcagac | 983 | CUGAGGCCCCUUAACUCAU | 1029 | AUGAGUUAAGGGGCCUCAGac |
| siSOD1-564 | 1076 | agatgagttaaggggcctcag | 984 | GAGGCCCCUUAACUCAUCU | 1030 | AGAUGAGUUAAGGGGCCUCag |
| siSOD1-566 | 1077 | acagatgagttaaggggcctc | 985 | GGCCCCUUAACUCAUCUGU | 1031 | ACAGAUGAGUUAAGGGGCCuc |
| siSOD1-567 | 1078 | aacagatgagttaaggggcct | 986 | GCCCCUUAACUCAUCUGUU | 1032 | AACAGAUGAGUUAAGGGGCcu |
| siSOD1-568 | 1079 | taacagatgagttaaggggcc | 987 | CCCCUUAACUCAUCUGUUA | 1033 | UAACAGAUGAGUUAAGGGGcc |
| siSOD1-569 | 1080 | ataacagatgagttaaggggc | 988 | CCCUUAACUCAUCUGUUAU | 1034 | AUAACAGAUGAGUUAAGGGgc |
| siSOD1-570 | 1081 | gataacagatgagttaagcgc | 989 | CCUUAACUCAUCUGUUAUC | 1035 | GAUAACAGAUGAGUUAAGGgg |
| siSOD1-573 | 1082 | caggataacagatgagttaag | 990 | UAACUCAUCUGUUAUCCUG | 1036 | CAGGAUAACAGAUGAGUUAag |
| siSOD1-575 | 1083 | agcaggataacagatgagtta | 991 | ACUCAUCUGUUAUCCUGCU | 1037 | AGCAGGAUAACAGAUGAGUua |
| siSOD1-576 | 1084 | tagcaggataacagatgagtt | 992 | CUCAUCUGUUAUCCUGCUA | 1038 | UAGCAGGAUAACAGAUGAGuu |
| siSOD1-578 | 1085 | gctagcaggataacagatgag | 993 | CAUCUGUUAUCCUGCUAGC | 1039 | GCUAGCAGGAUAACAGAUGag |
| siSOD1-579 | 1086 | agctagcaggataacagatga | 994 | AUCUGUUAUCCUGCUAGCU | 1040 | AGCUAGCAGGAUAACAGAUga |
| siSOD1-580 | 1087 | cagctagcaggataacagatc | 995 | UCUGUUAUCCUGCUAGCUG | 1041 | CAGCUAGCAGGAUAACAGAug |
| siSOD1-581 | 1088 | acagctagcaggataacagat | 996 | CUGUUAUCCUGCUAGCUGU | 1042 | ACAGCUAGCAGGAUAACAGau |
| siSOD1-582 | 1089 | tacagctagcaggataacaga | 997 | UGUUAUCCUGCUAGCUGUA | 1043 | UACAGCUAGCAGGAUAACAga |
| siSOD1-583 | 1090 | ctacagctagcaggataacag | 998 | GUUAUCCUGCUAGCUGUAG | 1044 | CUACAGCUAGCAGGAUAACag |
| siSOD1-584 | 1091 | tctacagctagcaggataaca | 999 | UUAUCCUGCUAGCUGUAGA | 1045 | UCUACAGCUAGCAGGAUAAca |
| siSOD1-585 | 1092 | ttctacagctagcaggataac | 1000 | UAUCCUGCUAGCUGUAGAA | 1046 | UUCUACAGCUAGCAGGAUAac |
| siSOD1-587 | 1093 | atttctacagctagcaggata | 1001 | UCCUGCUAGCUGUAGAAAU | 1047 | AUUUCUACAGCUAGCAGGAua |
| siSOD1-588 | 1094 | catttctacagctagcaggat | 1002 | CCUGCUAGCUGUAGAAAUG | 1048 | CAUUUCUACAGCUAGCAGGau |
| siSOD1-589 | 1095 | acatttctacagctagcagga | 1003 | CUGCUAGCUGUAGAAAUGU | 1049 | ACAUUUCUACAGCUAGCAGga |
| siSOD1-590 | 1096 | tacatttctacagctagcagg | 1004 | UGCUAGCUGUAGAAAUGUA | 1050 | UACAUUUCUACAGCUAGCAgg |
| siSOD1-591 | 1097 | atacatttctacagctagcag | 1005 | GCUAGCUGUAGAAAUGUAU | 1051 | AUACAUUUCUACAGCUAGCag |
| siSOD1-592 | 1098 | gatacatttctacagctagca | 1006 | CUAGCUGUAGAAAUGUAUC | 1052 | GAUACAUUUCUACAGCUAGca |
| siSOD1-594 | 1099 | aggatacatttctacagctag | 1007 | AGCUGUAGAAAUGUAUCCU | 1053 | AGGAUACAUUUCUACAGCUag |
| siSOD1-595 | 1100 | caggatacatttctacagcta | 1008 | GCUGUAGAAAUGUAUCCUG | 1054 | CAGGAUACAUUUCUACAGCua |
| siSOD1-596 | 1101 | tcaggatacatttctacagct | 1009 | CUGUAGAAAUGUAUCCUGA | 1055 | UCAGGAUACAUUUCUACAGcu |
| siSOD1-662 | 1102 | gtactttaaagcaactctgaa | 1010 | CAGAGUUGCUUUAAAGUAC | 1056 | GUACUUUAAAGCAACUCUGaa |
| siSOD1-663 | 1103 | ggtactttaaagcaactctga | 1011 | AGAGUUGCUUUAAAGUACC | 1057 | GGUACUUUAAAGCAACUCUga |
| siSOD1-665 | 1104 | caggtactttaaagcaactct | 1012 | AGUUGCUUUAAAGUACCUG | 1058 | CAGGUACUUUAAAGCAACUcu |
| siSOD1-668 | 1105 | ctacaggtactttaaagcaac | 1013 | UGCUUUAAAGUACCUGUAG | 1059 | CUACAGGUACUUUAAAGCAac |
| siSOD1-669 | 1106 | actacaggtactttaaagcaa | 1014 | GCUUUAAAGUACCUGUAGU | 1060 | ACUACAGGUACUUUAAAGCaa |
| siSOD1-670 | 1107 | cactacaggtactttaaagca | 1015 | CUUUAAAGUACCUGUAGUG | 1061 | CACUACAGGUACUUUAAAGca |
| siSOD1-672 | 1108 | ctcactacaggtactttaaag | 1016 | UUAAAGUACCUGUAGUGAG | 1062 | CUCACUACAGGUACUUUAAag |
| siSOD1-677 | 1109 | agtttctcactacaggtactt | 1017 | GUACCUGUAGUGAGAAACU | 1063 | AGUUUCUCACUACAGGUACuu |
| siSOD1-679 | 1110 | tcagtttctcactacaggtac | 1018 | ACCUGUAGUGAGAAACUGA | 1064 | UCAGUUUCUCACUACAGGUac |
| siSOD1-680 | 1111 | atcagtttctcactacaggta | 1019 | CCUGUAGUGAGAAACUGAU | 1065 | AUCAGUUUCUCACUACAGGua |
| siSOD1-681 | 1112 | aatcagtttctcactacaggt | 1020 | CUGUAGUGAGAAACUGAUU | 1066 | AAUCAGUUUCUCACUACAGgu |
| siSOD1-694 | 1113 | ccaagtgatcataaatcagtt | 1021 | CUGAUUUAUGAUCACUUGG | 1067 | CCAAGUGAUCAUAAAUCAGuu |

n.b.: Target sequence is identical to the identified antisense sequence but the nucleotide ″U″ is converted to ″T″. Antisense sequence includes 2-nt nucleotides natural overhang from the corresponding nucleotides on the DNA target.

TABLE 23
“Hotspot” region sequence in buman SOD1 3′UTR.

| | | SEQ ID |
|---|---|---|
| Hotspot | Hotspot sequences of siRNA on human SOD1 3′UTR (5′-3′) | NO |
| H1 (549 to 562) | ccttggatgtagtctgaggccccttaactcat | 61 |
| H2 (568 to 580) | ccccttaactcatctgttatcctgctagctg | 63 |
| Hotspot | Hotspot sequences of ASO on human SOD1 3′UTR (5′-3′) | |
| H3 (552 to 566) | tggatgtagtctgaggccccttaactcatctg | 65 |

TABLE 24
IC₅₀ values of top 19 siRNAs targeting SOD1 3′UTR

| Duplex | IC₅₀ (nM) |
|---|---|
| siSOD1-556 | 3.369 |
| siSOD1-557 | 2.78 |
| siSOD1-561 | 1.431 |
| siSOD1-562 | 3.984 |
| siSOD1-566 | 1.975 |
| siSOD1-567 | 2.915 |
| siSOD1-568 | 2.482 |
| siSOD1-569 | 1.376 |
| siSOD1-570 | 3.578 |
| siSOD1-573 | 1.439 |
| siSOD1-575 | 1.734 |
| siSOD1-576 | 1.989 |
| siSOD1-578 | 3.42 |
| siSOD1-580 | 2.169 |
| siSOD1-584 | 6.505 |
| siSOD1-585 | 1.1 |
| siSOD1-587 | 2.921 |
| siSOD1-590 | 4.49 |
| siSOD1-592 | 2.406 |

[0579] To test knockdown of SOD1 mRNA using ASOs, 16 representative ASOs (i.e., AO17-543, -546, -547, -549, -550, -552, -553, -554, -574, -596, -653, -650, -654, -678, -679, and -681) were synthesized out of 46 designs (Table 25) spanning the 3′UTR region inclusive to the underlined sequence in Table 21. All ASOs were designed using a 4-104 modification pattern in which 4 tandem 2′Ome-modified nucleotides flanked an internal stretch of 10 deoxyribose nucleic acids (DNA) on either side to form ‘gapmer’ ASOs 18 nucleotides in length. HEK293A cells were transfected at 5 and 50 nM concentrations with each ASO and knockdown activity was assessed 24 hours later via RT-qPCR. Sorting data by maximal knockdown activity revealed AO17-552, -554 and -553 were the best overall performers reducing SOD1 mRNA levels by ˜50% and ˜90% at 5 and 50 nM treatments, respectively (FIG. 35A). The next 3 best performing ASOs (i.e., AO17-549, -550, and -574) had a drop in activity measuring ˜40% reduction in SOD1 levels at only the higher 50 nM treatment concentration. All other ASOs had only a modest or no detectable impact on SOD1 expression levels.

[0580] Based on target location of the 6 best performing ASOs, an additional 27 ‘gapmers’ were selected for synthesis out of the 41 designs listed in Table 25 targeting the region between nucleotide numbers 544-593 in the 3′UTR. Knockdown activity was evaluated via RT-qPCR at 4 concentrations (i.e., 3.125, 1, 50, and 200 nM) in HEK293A cells 24 hours after transfection. Sorting knockdown data by target site location revealed an ASO-specific “hotspot” (referred to as H3) within the 3′UTR that contained a majority of the best performing ASOs (FIG. 35B). H3 is a 15 bp nucleic acid region on the target sequence of the ASOs, where the 5′-ends of the functional ASOs are located in the region of nucleotide number 552 to 566 relative to the TSS (Table 23). Dose response curves were subsequently generated via RT-qPCR for each of the top 4 performers (i.e., AO17-552, 553, 554, and 556) using 11 escalating concentrations (i.e., 0.002, 0.005, 0.015, 0.046, 0.137, 0.412, 1.235, 3.704, 11.111, 33.333 and 100 nM) to characterize ASO potency compared to Toferson (FIG. 36A). As summarized in Table 26, IC₅₀ values were all in the low nanomolar range (i.e., 2.23-6.22 nM) in which AO17-553 and AO17-554 were the most potent ASOs overall. Subsequent analyses for cytotoxicity were performed to determine impact on apoptosis and cell viability as markers for safety. As shown in FIG. 36B, there was no marked increase in apoptosis up to 100 nM for any of the tested ASOs as no significant changes in caspase 3/7 activity were detected after treatment in HEK293A cells. Cell viability was quantified by CCK8 assay at 5 escalating doses (i.e., 3.704, 11.111, 33.333, 100, and 300 nM) in HEK293A cells 1 day after transfection. As shown in FIG. 36C, cell viability was unaffected at any dose for Toferson, AO17-552, and AO17-553, whereas AO17-554 and AO-556 had moderate cytotoxicity measuring a maximal loss of ˜30% and ˜50% in cell viability, respectively.

TABLE 25
SOD1 ASOs sequence targeting human SOD1 3′UTR

| Oligo- | | | SEQ | | SEQ | | |
|---|---|---|---|---|---|---|---|
| nucleotide | | Target | ID | Target sequence | ID | | |
| name | Type | gene | NO | (5′-3′) | NO | Sequence (5′-3′) | Size (nt) |
| AO17-543 | ASO | SOD1 | 1114 | ctacatccaagggaatgt | 1155 | meC*meU*meA*meC*a*t*c*c*a*a*g*g*g*a*meA*meU*meG*meU | 18 |
| AO17-544 | ASO | SOD1 | 1115 | actacatccaagggaatg | 1156 | meA*meC*meU*meA*c*a*t*c*c*a*a*g*g*g*meA*meA*meU*meG | 18 |
| AO17-545 | ASO | SOD1 | 1116 | gactacatccaagggaat | 1157 | meG*meA*meC*meU*a*c*a*t*c*c*a*a*g*g*meG*meA*meA*meU | 18 |
| A017-546 | ASO | SOD1 | 1117 | agactacatccaagggaa | 1158 | meA*meG*meA*meC*t*a*c*a*t*c*c*a*a*g*meG*meG*meA*meA | 18 |
| AO17-547 | ASO | SOD1 | 1118 | cagactacatccaaggga | 1159 | meC*meA*meG*meA*c*t*a*c*a*t*c*c*a*a*meG*meG*meG*meA | 18 |
| AO17-548 | ASO | SOD1 | 1119 | tcagactacatccaaggg | 1160 | meU*meC*meA*meG*a*c*t*a*c*a*t*c*c*a*meA*meG*meG*meG | 18 |
| AO17-549 | ASO | SOD1 | 1120 | ctcagactacatccaagc | 1161 | meC*meU*meC*meA*g*a*c*t*a*c*a*t*c*c*meA*meA*meG*meG | 18 |
| AO17-550 | ASO | SOD1 | 1121 | cctcagactacatccaag | 1162 | meC*meC*meU*meC*a*g*a*c*t*a*c*a*t*c*meC*meA*meA*meG | 18 |
| A017-551 | ASO | SOD1 | 1122 | gcctcagactacatccaa | 1163 | meG*meC*meC*meU*c*a*g*a*c*t*a*c*a*t*meC*meC*meA*meA | 18 |
| AO17-552 | ASO | SOD1 | 1123 | ggcctcagactacatcca | 1164 | meG*meG*meC*meC*t*c*a*g*a*c*t*a*c*a*meU*meC*meC*meA | 18 |
| AO17-553 | ASO | SOD1 | 1124 | gggcctcagactacatec | 1165 | meG*meG*meG*meC*c*t*c*a*g*a*c*t*a*c*meA*meU*meC*meC | 18 |
| AO17-554 | ASO | SOD1 | 1125 | ggggcctcagactacatc | 1166 | meG*meG*meG*meG*c*c*t*c*a*g*a*c*t*a*meC*meA*meU*meC | 18 |
| AO17-555 | ASO | SOD1 | 1126 | aggggcctcagactacat | 1167 | meA*meG*meG*meG*g*c*c*t*c*a*g*a*c*t*meA*meC*meA*meU | 18 |
| A017-556 | ASO | SOD1 | 1127 | aaggggcctcagactaca | 1168 | meA*meA*meG*meG*g*g*c*c*t*c*a*g*a*c*meU*meA*meC*meA | 18 |
| A017-557 | ASO | SOD1 | 1128 | taaggggcctcagactac | 1169 | meU*meA*meA*meG*g*g*g*c*c*t*c*a*g*a*meC*meU*meA*meC | 18 |
| AO17-558 | ASO | SOD1 | 1129 | ttaaggggcctcagacta | 1170 | meU*meU*meA*meA*g*g*g*g*c*c*t*c*a*g*meA*meC*meU*meA | 18 |
| AO17-559 | ASO | SOD1 | 1130 | gttaaggggcctcagact | 1171 | meG*meU*meU*meA*a*g*g*g*g*c*c*t*c*a*meG*meA*meC*meU | 18 |
| AO17-560 | ASO | SOD1 | 1131 | agttaaggggcctcagac | 1172 | meA*meG*meU*meU*a*a*g*g*g*g*c*c*t*c*meA*meG*meA*meC | 18 |
| A017-561 | ASO | SOD1 | 1132 | gagttaaggggcctcaga | 1173 | meG*meA*meG*meU*t*a*a*g*g*g*g*c*c*t*meC*meA*meG*meA | 18 |
| AO17-562 | ASO | SOD1 | 1133 | tgagttaaggggcctcag | 1174 | meU*meG*meA*meG*t*t*a*a*g*g*g*g*c*c*meU*meC*meA*meG | 18 |
| AO17-563 | ASO | SOD1 | 1134 | atgagttaaggggcctca | 1175 | meA*meU*meG*meA*g*t*t*a*a*g*g*g*g*c*meC*meU*meC*meA | 18 |
| AO17-564 | ASO | SOD1 | 1135 | gatgagttaaggggcctc | 1176 | meG*meA*meU*meG*a*g*t*t*a*a*g*g*g*g*meC*meC*meU*meC | 18 |
| AO17-565 | ASO | SOD1 | 1136 | agatgagttaaggggcct | 1177 | meA*meG*meA*meU*g*a*g*t*t*a*a*g*g*g*meG*meC*meC*meU | 18 |
| A017-566 | ASC | SOD1 | 1137 | cagatgagttaaggggcc | 1178 | meC*meA*meG*meA*t*g*a*g*t*t*a*a*g*g*meG*meG*meC*meC | 18 |
| AO17-567 | ASO | SOD1 | 1138 | acagatgagttaaggggc | 1179 | meA*meC*meA*meG*a*t*g*a*g*t*t*a*a*g*meG*meG*meG*meC | 18 |
| AO17-568 | ASO | SOD1 | 1139 | aacagatgagttaagggg | 1180 | meA*meA*meC*meA*g*a*t*g*a*g*t*t*a*a*meG*meG*meG*meG | 18 |
| AO17-569 | ASO | SOD1 | 1140 | taacagatgagttaaggg | 1181 | meU*meA*meA*meC*a*g*a*t*g*a*g*t*t*a*meA*meG*meG*meG | 18 |
| AO17-570 | ASO | SOD1 | 1141 | ataacagatgagttaagg | 1182 | meA*meU*meA*meA*c*a*g*a*t*g*a*g*t*t*meA*meA*meG*meG | 18 |
| AO17-571 | ASO | SOD1 | 1142 | gataacagatgagttaag | 1183 | meG*meA*meU*meA*a*c*a*g*a*t*g*a*g*t*meU*meA*meA*meG | 18 |
| AO17-572 | ASO | SOD1 | 1143 | ggataacagatgagttaa | 1184 | meG*meG*meA*meU*a*a*c*a*g*a*t*g*a*g*meU*meU*meA*meA | 18 |
| A017-573 | ASO | SOD1 | 1144 | aggataacagatgagtta | 1185 | meA*meG*meG*meA*t*a*a*c*a*g*a*t*g*a*meG*meU*meU*meA | 18 |
| AO17-574 | ASO | SOD1 | 1145 | caggataacagatgagtt | 1186 | meC*meA*meG*meG*a*t*a*a*c*a*g*a*t*g*meA*meG*meU*meU | 18 |
| AO17-575 | ASO | SOD1 | 1146 | gcaggataacagatgagt | 1187 | meG*meC*meA*meG*g*a*t*a*a*c*a*g*a*t*meG*meA*meG*meU | 18 |
| AO17-576 | ASO | SOD1 | 1147 | agcaggataacagatgag | 1188 | meA*meG*meC*meA*g*g*a*t*a*a*c*a*g*a*meU*meG*meA*meG | 18 |
| AO17-596 | ASO | SOD1 | 1148 | caggatacatttctacag | 1189 | meC*meA*meG*meG*a*t*a*c*a*t*t*t*c*t*meA*meC*meA*meG | 18 |
| A017-650 | ASO | SOD1 | 1149 | actctgaaaaagtcacac | 1190 | meA*meC*meU*meC*t*g*a*a*a*a*a*g*t*c*meA*meC*meA*meC | 18 |
| A017-653 | ASO | SOD1 | 1150 | gcaactctgaaaaagtca | 1191 | meG*meC*meA*meA*c*t*c*t*g*a*a*a*a*a*meG*meU*meC*meA | 18 |
| AO17-654 | ASO | SOD1 | 1151 | agcaactctgaaaaagtc | 1192 | meA*meG*meC*meA*a*c*t*c*t*g*a*a*a*a*meA*meG*meU*meC | 18 |
| AO17-678 | ASO | SOD1 | 1152 | agtttctcactacaggta | 1193 | meA*meG*meU*meU*t*c*t*c*a*c*t*a*c*a*meG*meG*meU*meA | 18 |
| AO17-679 | ASO | SOD1 | 1153 | cagtttctcactacaggt | 1194 | meC*meA*meG*meU*t*t*c*t*c*a*c*t*a*c*meA*meG*meG*meU | 18 |
| A017-681 | ASO | SOD1 | 1154 | atcagtttctcactacag | 1195 | meA*meU*meC*meA*g*t*t*t*c*t*c*a*c*t*meA*meC*meA*meG | 18 |

n.b.: Uppercase, RNA; Lowercase, DNA; *, phosphorothioate (PS) backbone modification; me, 2′-O-methoxyethyl (2′MOE); ;C, 5′ methyl cytosine; U, 5-methyl uracil, c, 5′ methyl cytosine.

TABLE 26
IC₅₀ values of top 4 ASOs targeting SOD1 3'UTR

| ASOs | IC₅₀ (nM) |
|---|---|
| Tofersen | 2.80 |
| AO17-552 | 2.81 |
| AO17-553 | 2.23 |
| AO17-554 | 2.41 |
| AO17-556 | 6.22 |

### Example 22. Synthesis of Linking Component Compounds for Linking ACO with Duplex Oligonucleotide at an Internal Position of its Sense or Antisense Strand

Compound list:

[chemical structure]

[0581] Compounds 1, 2, 3, 4, 5, 6, 7 are commercially available. All these compounds were applied as monomer/spacer in oligo synthesis.

Compound 8 Synthesis Compound 8 was prepared in this Example by using the following procedures.

[chemical structure]

### (1) Preparation of compound 16 from the starting compound ((1r,4r)-cyclohexane-1,4-diyl)dimethanol 15

[chemical structure]

[0582] To a solution of ((1r,4r)-cyclohexane-1,4-diyl)dimethanol 15 (10 g, 69.3 mmol, 1.0 eq) in anhydrous pyridine (200 mL) under nitrogen atmosphere was added DMTrCl (23.48 g, 69.3 mmol, 1.0 eq) slowly. The reaction mixture was stirred at room temperature for 6 h then concentrated under reduced pressure, the resultant residue was purified by flash chromatography (silica gel, gradient eluent: 1-3% of MeOH/DCM) to provide compound 16 (12.1 g, 39% yield) as yellow oil. The product was characterized with mass spectrometry and ¹H NMR. MW calc.: 446.25; MW Found: 303.09 [DMT]⁻, 144.15 [DMT off+H]⁺. ¹H NMR (400 MHz, CDCl₃) δ 7.49 (d, J=7.4 Hz, 2H), 7.37 (t, J=6.0 Hz, 4H), 7.34-7.31 (m, 2H), 7.23 (dd, J=4.7, 2.4 Hz, 1H), 6.88-6.85 (m, 4H), 3.83 (s, 6H), 3.53-3.49 (m, 2H), 2.93 (dd, J=6.2, 3.8 Hz, 2H), 1.91 (dd, J=13.0, 5.0 Hz, 4H), 1.63 (d, J=3.3 Hz, 1H), 1.43 (s, 1H), 1.03 (dd, J=12.7, 7.9 Hz, 41H).

### (2) Preparation of Compound 8 from Compound 16

[chemical structure]

[0583] To a solution of compound 16 (3.4 g, 7.65 mmol, 1.0 eq) and diisopropylammonium tetrazolide (2.6 g, 15.3 mmol, 2.0 eq) in anhydrous Dichloromethane (DCM, 30 mL) under nitrogen atmosphere was added 3-((bis(diisopropylamino)phosphaneyl)oxy)propanenitrile (4.6 g, 15.3 mmol, 2.0 eq.) at room temperature. The reaction mixture was stirred for 3 h. The mixture was extracted two times with DCM, then washed with brine and dried with anhydrous Na₂SO₄. The organic layer was concentrated under reduced pressure and the resultant residue was purified with flash chromatography (silica gel, gradient eluent. 1-20% of EtOAc/Hexane, 1% Et N) to provide compound 8 (3.65 g, 75% yield) as yellow oil. The product was characterized with mass spectrometry and ¹H NMR. MW calc.: 646.35; MW Found 303.09 [DMT]⁻, 302.36 [DMT and one isopropyl off]⁺. ¹H NMR (400 MHz, CDCl₃) δ 7.47 (d, J=7.3 Hz, 2H), 7.35 (t, J=6.0 Hz, 4H), 7.30 (d, J=8.4 Hz, 2H), 7.24-7.20 (m, 1H), 6.87-6.83 (m, 4H), 3.94-3.83 (m, 2H), 3.82 (s, 6H), 3.64 (ddt, J=13.6, 10.1, 6.8 Hz, 2H), 3.52 (dt, J=9.7, 7.4 Hz, 1H), 3.43 (dt, J=9.9, 7.1 Hz, 11H), 2.91 (d, J=6.3 Hz, 2H), 2.67 (t, J=6.5 Hz, 2H), 1.88 (dd, J=24.8, 6.2 Hz, 4H), 1.64-1.55 (m, 2H), 1.22 (dd, J=6.8, 3.2 Hz, 12H), 1.02 (t, J=10.4 Hz, 4H).

### Compound 9 Synthesis

[0584] Compound 9 was prepared in this Example by using the following procedures.

[chemical structure]

### (1) Preparation of compound 18 from the starting compound 2,2′-(1,4-phenylene)bis(ethan-1-ol) 17

[chemical structure]

[0585] To a solution of 2,2′-(1,4-phenylene)bis(ethan-1-ol) 17 (3 g, 18.0 mmol, 1.0 eq) in anhydrous pyridine (50 mL) under nitrogen atmosphere was added DMTrCl (6.1 g, 18.0 mmol, 1.0 eq) slowly. The reaction mixture was stirred at room temperature for 6 h then concentrated under reduced pressure, the resultant residue was purified by flash chromatography (silica gel, gradient eluent: 1-3% of MeOH/DCM) to provide compound 6 (3.74 g, 44% yield) as yellow oil. The product was characterized with mass spectrometry and ¹H NMR MW calc: 468.23; MW Found: 303.16 [DMT]⁻, 491.31 [M+Na]⁺. ¹H NMR (400 MHz, CDCl₃) δ 7.42 (dd, J=5.3, 3.3 Hz, 2H), 7.33-7.29 (m, 4H), 7.28 (d, J=7.8 Hz, 2H), 7.22 (s, 11H), 7.18 (s, 4H), 6.85-6.81 (m, 4H), 3.88 (dd, J=8.3, 4.8 Hz, 2H), 3.81 (s, 6H), 3.31 (t, J=7.0 Hz, 2H), 2.93-2.87 (m, 4H).

### (2) Preparation of Compound 9 from Compound 18

[chemical structure]

[0586] To a solution of compound 18 (884 mg, 1.89 mmol, 1.0 eq) and diisopropylammonium tetrazolide (647 mg, 3.78 mmol, 2.0 eq) in anhydrous DCM (10 mL) under nitrogen atmosphere was added 3-((bis(diisopropylamino)phosphaneyl)oxy)propanenitrile (1.14 g, 3.78 mmol, 2.0 eq.) at room temperature. The reaction mixture was stirred for 3 h. The mixture was extracted two times with DCM, then washed with brine and dried with anhydrous Na₂SO₄. The organic layer was concentrated under reduced pressure and the resultant residue was purified with flash chromatography (silica gel, gradient eluent. 1-30% of EtOAc/Hexane, 1% Et₃N) to provide compound 9 (292 mg, 23% yield) as yellow oil. The product was characterized with mass spectrometry and ¹H NMR. MW calc.: 668.34; MW Found 303.11 [DMT]⁻. ¹H NMR (400 MHz, CDCl₃) δ7.41-7.38 (m, 2H), 7.29 (d, J=7.9 Hz, 6H), 7.23 (d, J=7.1 Hz, 1H), 7.18-7.14 (m, 4H), 6.85-6.80 (m, 4H), 3.96-3.82 (m, 2H), 3.81 (d, J=6.8 Hz, 6H), 3.78-3.72 (m, 2H), 3.65-3.55 (m, 2H), 3.29 (t, J=7.0 Hz, 2H), 2.92 (dt, J=16.8, 7.1 Hz, 4H), 2.52 (td, J=6.5, 2.9 Hz, 2H), 1.18 (dd, J=14.4, 6.8 Hz, 12H).

### Compound 10 Synthesis

[0587] Compound 10 was prepared in this Example by using the following procedures.

[chemical structure]

### (1) Preparation of compound 20 from the reduction of starting compound 2,2′-(cyclohexane-1,1-diyl)diacetic acid 19

[chemical structure]

[0588] To a solution of compound 19 (10 g, 50 mmol, 1.0 eq) in anhydrous THF (200 mL) under nitrogen atmosphere and ice bath was added LiAlH4 (5.7 g, 150 mmol, 3.0 eq). The mixture was then transferred to room temperature after 10 minutes and stirred for about 1 h. Then the reaction was transferred to ice bath, saturated potassium sodium tartrate solution (100 mL) was added slowly into the mixture. After 30 minutes, the reaction was extracted 3 times by Et2O, then the organic phase was combined and washed by brine, dried over Na2SO4, and concentrated. The product was characterized with mass spectrometry. MW calc.: 172.15; MW Found: 173.22 [M+H]+.

### (2) Preparation of Compound 21 from Compound 20

[chemical structure]

[0589] To a solution of compound 20 (3 g, 17.4 mmol, 1.0 eq) in anhydrous pyridine (50 mL) under nitrogen atmosphere was added DMTrCl (4.7 g, 13.92 mmol, 0.8 eq) slowly. The reaction mixture was stirred at room temperature for 6 hi then concentrated under reduced pressure. The resultant residue was purified by flash chromatography (silica gel, gradient eluent: 1-3% of MeOH/DCM) to provide compound 21 (3.0 g, 36% yield) as yellow oil. The product was characterized with mass spectrometry and ¹H NMR. MW calc.: 474.28; MW Found 303.12 [DMT]⁻. ¹H NMR (400 MHz, CDCl₃) δ 7.46-7.41 (m, 2H), 7.35-7.30 (m, 4H), 7.28 (d, J=2.3 Hz, 2H), 7.19-7.15 (m, 1H), 6.84-6.80 (m, 4H), 3.78 (s, 6H), 3.59 (dd, J=9.5, 5.8 Hz, 2H), 3.11 (t, J=7.2 Hz, 2H), 1.45-1.34 (m, 10H), 1.20 (dd, J=6.8, 3.4 Hz, 4H).

### (3) Preparation of Compound 10 from Compound 21

[chemical structure]

[0590] To a solution of compound 21 (1.3 g, 2.74 mmol, 1.0 eq) and diisopropylammonium tetrazolide (938 mg, 5.48 mmol, 2.0 eq) in anhydrous DCM (15 mL) under nitrogen atmosphere was added 3-((bis(diisopropylamino)phosphaneyl)oxy)propanenitrile (1.65 g, 5.48 mmol, 2.0 eq.) at room temperature. The reaction mixture was stirred for 3 h. The mixture was extracted two times with DCM, then washed with brine and dried with anhydrous Na₂SO₄. The organic layer was concentrated under reduced pressure and the resultant residue was purified with flash chromatography (silica gel, gradient eluent: 1-20% of EtOAc/Hexane, 1% Et₃N) to provide compound 10 (425 mg, 23% yield) as yellow oil. The product was characterized with mass spectrometry and ¹H NMR MW calc.: 674.38; MW Found: 303.23 [DMT]⁻, 396.30 [DMT and one isopropyl off+Na]⁺. ¹H NMR (400 MHz, CDCl₃) δ 7.45-7.40 (m, 2H), 7.34-7.29 (m, 4H), 7.29-7.25 (m, 2H), 7.22-7.16 (m, 1H), 6.86-6.79 (m, 4H), 3.79 (s, 6H), 3.78-3.71 (m, 2H), 3.65-3.50 (m, 41H), 3.10 (t, J=7.4 Hz, 2H), 2.58 (t, J=6.6 Hz, 2H), 1.66 (t, J=7.4 Hz, 2H), 1.51 (t, J=7.6 Hz, 2H), 1.37 (dd, J=18.4, 4.5 Hz, 6H), 1.22 (s, 4H), 1.17 (d, J=6.8 Hz, 6H), 1.13 (d, J=6.8 Hz, 6H).

[0591] All compounds in this example are listed in Table 1.

### Example 23. Design of Various ODV-siSOD1 Structures

[0592] A series of ACO sequences with varying lengths, nucleotide compositions, and chemical modifications were conjugated to Sod1 siRNA duplex (siSOD1, RD-12559) on the 3′ terminus of its passenger strand using the L9 linker or alternative spacer as indicated resulting in a total of 90 ODV-siRNA variants categorized into 12 groups. All ACO) variants are listed by group in Table 27, while each ODV-siSOD1 duplex can be found in Table 28.

[0593] Group A (Linker group) includes 8 compounds in which the siRNA and ACO components were fixed, but conjugated together using different linkers including S18, C3, C6, C12, L14, L15, L16, UUACA and UUCUU.

[0594] Group B (Palindromic AC1 sequence group) includes 15 compounds in which the siRNA and linker (L9) were fixed, but different palindromic AC1 sequence and length were used based on AC1 sequence. All nucleic acid chemistries remained unchanged compared to AC1 including 2′MOE modification and PS backbone at every position within each ACO.

[0595] Group C (PS modification group) includes 6 compounds in which the siRNA, linker (L9), and ACO sequence remained fixed, but varied in the number of PS backbone modifications (from 2 to 12) in the ACO.

[0596] Group D (2′-Ome modification group) includes 7 compounds in which the siRNA, linker (L9), and ACO sequence remained fixed, but varied in the number of 2′Ome substitutions (from 2 to 14) for 2′MOE.

[0597] Group E (ACO size group) includes 8 compounds in which the siRNA and linker (L9) remained fixed, but ACO composition changed only in size ranging from 13 to 6 nucleotide in length.

[0598] Group F (Adenine rich group) includes 5 compounds in which the siRNA, linker (L9), and ACO size and chemistry pattern remained fixed, but the total number of adenine nucleotides range from 5 to 9 in the ACO sequence.

[0599] Group G (Cytosine rich group) includes 6 compounds in which the siRNA, linker (L9), and ACO size and chemistry pattern remained fixed, but the total number of cytosine nucleotides range from 5 to 10 in the ACO sequence.

[0600] Group H (Guanine rich group) includes 5 compounds in which the siRNA, the linker (L9), and ACO size and chemistry pattern remained fixed, but the total number of guanine nucleotides range from 5 to 9 in the ACO sequence.

[0601] Group I (Uracil rich group) includes 6 compounds in which the siRNA, linker (L9), and ACO size and chemistry pattern remained fixed, but the total number of uracil nucleotides range from 5 to 10 in the ACO sequence.

[0602] Group J (Purine rich group) includes 8 compounds in which the siRNA, linker (L9), and ACO size and chemistry pattern remained fixed, but the total number of purines range from 9 to 11 in the ACO sequence.

[0603] Group K (Pyrimidine rich group) includes 8 compounds in which the siRNA, linker (L9), and ACO size and chemistry pattern remained fixed, but the total number of pyrimidines range from 9 to 12 in the ACO sequence.

[0604] Group L (Balanced pur:pyr group) includes 6 compounds in which the siRNA, linker (L9), and ACO size and chemistry pattern remained fixed, but the ACO contains an equal ratio of purines to pyrimidines comprised of different sequences.

### Example 24. In Vitro Uptake and Safety Assessment of ODV-siSOD1 Compounds in PMH Cells

[0605] Free uptake of each ODV-siSOD1 variant listed in Table 28 was tested by directly adding each duplex to freshly isolated PMH (primary mouse hepatocyte) cells at 0.1 μM or 1 μM concentrations without the use of any additional transfection reagent. siSOD1 without ACO conjugate (RD-12556) served as a non-conjugate control, whereas DS17-04M3-AC1(me14)-L9V3 (RD-12559) served as a positive control for ODV-siRNA knockdown activity. RNA extracts were prepared 3 days after treatment and Sod1 levels were quantified via RT-qPCR. In general, knockdown of Sod1 was dose-dependent for all ODV-siSOD1 variants in which each ACO conjugate outperformed the siSOD1 only control; however, changes in ACO composition or its linker in some instances did impact free uptake activity (FIG. 37A). Cell viability was also assessed in parallel for all 90 ODV compounds via PI staining to determine if modification of ODV-siSOD1 composition impacted cytotoxicity in viro. As shown in FIG. 37B, any measurable changes in cytotoxicity were nominal all falling below a 1.5-fold increase in staining implying that all the ODV-siRNA variants, in general, are equally safe.

### Example 25. Effects of ACO Composition and Linker Choice on ODV-siRNA in PMH Cells

[0606] Group A (Linker group) included 10 compounds (i.e., RD-12941, RD-12942, RD-12943, RD-12944, RD-12945, RD-12947, RD-12948, RD-12949, RD-12950 and RD-12951). All compounds in this group except RD-12943 and RD-12944 had better knockdown activity over the exemplary ODV-siRNA control (RD-12559) suggesting ODV-siRNA can tolerate several different linker types in which certain varieties can provide greater potency (FIG. 37A, FIG. 38). For instance, RD-12948 containing the C12 linker had near maximal knockdown activity at both 0.1 μM and 1 μM treatment concentrations, whereas natural RNA linkers (e.g., RD-12943 and RD-12944) significantly compromised delivery (FIG. 38).

[0607] Group B (Palindromic AC1 sequence group) included 15 compounds containing sequence derivatives based on the exemplary ACO called AC1 (i.e., RD-12952, RD-12953, RD-12954, RD-12955, RD-12956, RD-12957, RD-12958, RD-12959, RD-12960, RD-12961, RD-12962, RD-12963, RD-12964, RD-12965, and RD-12966). As shown in FIG. 57, the AC1 sequence contains a perfect palindromic sequence with a 2-nt central spacer between the two palindromic wings and based on AC1, a series of palindromic ACO sequences were designed. All compounds in this group had knockdown activity equal to or better than the exemplary ODV-siRNA control (RD-12559) suggesting the palindromic feature in the ACO may provide benefits for cellular uptake and in vivo activity and can be independently optimized (FIG. 37A, FIG. 39). For instance, RD-12952, RD-12953, RD-12954, RD-12955, and RD-12956 have a varying palindromic ACO (FIG. 57) and superior activity at both contractions compared to the exemplary ODV-siRNA control (RD-12559). RD-12957 and RD-12958 with AC1 variants shorter in size at a respective 6 and 8 nucleotides in length had reduced activity compared to larger variants in this groups supporting ACO size impacts free uptake (FIG. 39).

[0608] Group C (PS modification group) included 6 compounds (i.e., RD-12967, RD-12968, RD-12969, RD-12970, RD-12971 and RD-12972) each with the same 14-nt ACO containing either 2, 4, 6, 8, 10 or 12 PS modifications, respectively. As shown in FIG. 40, increasing the number of PS modification in the ACO resulted in improved knockdown activity of the corresponding ODV-siSOD1. These results demonstrate a clear correlation in free uptake with the number of PS modifications in which delivery efficacy of ODV-siRNAs may be optimized by adjustment in PS chemistry.

[0609] Group D (2′Ome modification group) included 7 compounds (i.e., RD-12973, RD-12974, RD-12975, RD-12976, RD-12977, RD-12978 and RD-12979) each with the same 14-nt ACO containing either 2, 4, 6, 8, 10 or 12 substitutions of 2′MOE chemistry for 2′Ome, respectively. All compounds in this group had knockdown activity equal to or better than the exemplary ODV-siRNA control (RD-12559) suggesting 2′Ome modification is interchangeable for 2′MOE and may offer benefits in cell uptake when included into the ACO sequence (FIG. 37A, FIG. 41).

[0610] Group E (ACO size group) included 8 compounds (i.e., RD-12980, RD-12981, RD-12982, RD-12983, RD-12984, RD-12985, RD-12986 and RD-12987) derived by truncating the 14-nt ACO in RD-12559 to 13, 12, 11, 10, 9, 8, 7, or 6 nucleotides in length, respectively. As shown in FIG. 42, knockdown activity of the ODV-siRNAs was approximately equal to the exemplary ODV-siRNA control (RD-12559) at ACO lengths greater than 10 nucleotides.

[0611] Shorter ACO lengths at 10 to 6 nucleotides correlated with reduced ODV-siSOD1 knockdown activity suggesting a reduction in cellular uptake and reenforcing the importance of ACO size on delivery.

[0612] The remaining groups were designed to further investigate nucleotide composition on uptake and knockdown activity of ODV-siRNA. Group F (Adenine rich group) included 5 compounds (i.e., RD-12988, RD-12989, RD-12990, RD-12991, and RD-12992) each with a different 14-nt ACO sequence containing either 5, 6, 7, 8, or 9 total adenine nucleotides, respectively. All compounds in this group had knockdown activity similar to the exemplary ODV-siRNA control (RD-12559) suggesting ACO sequence is amendable to variable adenosine content for cellular uptake (FIG. 37A, FIG. 43).

[0613] Group G (Cytosine rich group) included 6 compounds (i.e., RD-12993, RD-12994, RD-12995, RD-12996, RD-12997, and RD-12997) each with a different 14-nt ACO sequence containing either 5, 6, 7, 8, 9, or 10 total cytosine nucleotides, respectively. As shown in FIG. 44, compounds in this group had a marginal loss in knockdown activity compared to the exemplary ODV-siRNA control (RD-12559) as cytosine content increased in the ACO sequence. This data suggests limiting cytosine content in ACO sequence may be beneficial for free uptake and knockdown activity for ODV-siRNA.

[0614] Group H (Guanine rich group) included 5 compounds (i.e., RD-12999, RD-13000, RD-13001, RD-13002, and RD-13003) each with a different 14-nt ACO sequence containing either 5, 6, 7, 8, or 9 total guanine nucleotides, respectively. All compounds in this group had knockdown activity equal to or slight better than the exemplary ODV-siRNA control (RD-12559) suggesting ACO sequence is amendable to variable guanine content for cellular uptake (FIG. 37A, FIG. 45).

[0615] Group I (Uracil rich group) included 6 compounds (i.e., RD-13004, RD-13005, RD-13006, RD-13007, RD-13008, and RD-13009) each with a different 14-nt ACO sequence containing either 5, 6, 7, 8, 9, or 10 total uracil nucleotides, respectively. As shown in FIG. 46, knockdown activity generally improved with uracil suggesting ACO sequence is amendable to variable uracil content for cellular uptake.

[0616] Group J (Purine rich group) included 8 compounds each with a different 14-nt ACO sequence containing 9 purines (i.e., RD-13010, RD-13011, and RD-13012), 10 purines (i.e., RD-13013, RD-13014, and RD-13015), or 11 purines (i.e., RD-13016 and RD-13017) comprised of different amounts of adenosine and guanine. In general, knockdown activity improved as purine content increased ACO sequence (FIG. 37A, FIG. 47).

[0617] Group K (Pyrimidine rich group) included 8 compounds each with a different 14-nt ACO sequence containing 9 pyrimidines (i.e., RD-13018, RD-13019, and RD-13020), 10 pyrimidines (i.e., RD-13021 and RD-13022), 11 pyrimidines (i.e., RD-13023 and RD-13024), or 12 pyrimidines (i.e., RD-13025) comprised of different amounts of cytosine and uracil. As shown in FIG. 48, compounds in this group had knockdown activity similar to the exemplary ODV-siRNA control (RD-12559) with a slight trend toward reduced activity as pyrimidine content reached 11 and 12 nucleotides in manner similar to Group G (Cytosine rich group).

[0618] Group L (Balanced purine:pyrimidine group) included 6 compounds (i.e., RD-13026. RD-13027, RD-13028, RD-13029, RD-13030, and RD-13031) each with a different 14-nt ACO sequence containing a fixed 1:1 ratio of purines to pyrimidines, respectively. All compounds in this group had comparatively similar knockdown activity further supporting that a specific sequence is not necessary for cellular uptake when controlling for purine and pyrimidine content within ACO (FIG. 49).

[0619] Overall, these results indicate that a specific ACO sequence is not the driver of cellular uptake, but its nucleotide content can impact delivery and ODV-siRNA knockdown activity. For instance, purine rich content appears to provide better free uptake in comparison to cytosine or pyrimidine rich ACO sequence. The major influence on free uptake appears to be ACO length, chemistry (i.e., PS quantity and 2′moeity content), and linker selection within ODV-siRNA.

### Example 26. In Vivo Knockdown Activity of ODV-siSOD1 in Mouse Lung

[0620] To validate ODV-siRNA activity in the lung, adult C57BL/6J mice were treated with several ODV-siSOD1s with (i.e., RD-12557 and RD-12559) or without (i.e., RD-12403 and RD-12929) the 5′VP modification via ITI administration at a total dose of 0.1 or 0.6 mg. A non-specific ODV-siRNA without the 5′VP modification (i.e., RD-12404) served as negative control for knockdown activity. ACO-absent siRNAs with (i.e., RD-12556) or without (i.e., RD-12402) the 5′VP modification served as comparison controls for ODV chemistry. RD-12401 devoid of any medicinal chemistry and ACO conjugation served as an unmodified siSOD1 control. All test articles were formulated in saline in which treatment with saline alone served as procedural control to establish baseline expression levels of mouse Sod1. All sequences are listed in Table 29.

[0621] As shown in FIG. 50A, neither RD-12401 nor RD-12402 significantly reduced Sod1 levels compared to baseline on day 7 following treatment at 0.6 mg total dose in lung tissue. However, ACO-conjugation in absence of 5′VP modification (i.e., RD-12403 and RD-12929) measured a respective 53% and 69% reduction in Sod1 levels. Addition of 5′VP further reduced knockdown activity to 67% and 80% for cognate ODV-siRNAs RD-12557 and RD-12559, respectively. The combination of both ACO conjugate and the 5′VP appear to provide enhanced knockdown activity in lung tissue for ODV-siSOD1. In support, treatment with of RD-12559 at 0.1 or 0.6 mg had greater overall knockdown activity and durability at day 7 and 21 after treatment compared to non-ACO cognate RD-12556 or non-5′VP variant RD-12929 (FIG. 50B-C).

### Example 27. In Vivo Knockdown Activity of ODV-siSOD1 in Mouse Muscle

[0622] To test ODV-siRNA activity in muscle, adult SOD1^{G93A} mice at PND 46 were treated with ODV-siSOD1 (i.e., RD-12293) at 20 or 50 mg/kg via IV or SC injection. Saline served as a procedural control to establish baseline expression levels of SOD1 mRNA. Mice were sacrificed on day 14 after treatment and knockdown activity was quantified in muscle tissue via RT-qPCR. As shown in FIG. 51A, IV injection of RD-12293 provided modest knockdown of SOD1 in mouse muscle reducing mRNA levels by ˜44% and ˜31% at 20 mg/kg and 50 mg/kg, respectively. Conversely, SC injection had far less measurable activity in muscle reducing SOD1 levels by only 13% at the highest dose (FIG. 51B). These results indicate that route of administration can impact ODV-siRNA potency in which IV injection of RD-12293 had better knockdown activity in mouse muscle compared SC injection for systemic delivery.

[0623] ODV-siRNA knockdown activity in muscle was further screened in adult C57BL/6J mice via IV injection using several representatives from each of the groups of ACO design variants listed in Table 27. RD-12559 served as an exemplary ODV-siRNA with the L9 linker and 5′VP modification, while RD-12556 functioned as its non-ACO cognate control. RD-13180 was updated version of RD-12559 in which 2 additional PS backbone modifications were placed directly flanking the L9 linker on either end in order to further enhance nuclease resilience (Table 30). Mice were sacrificed on day 7 following treatment and Sod) mRNA knockdown was quantified in several different muscle tissues (i.e., Forelimb, Hindlimb, Nape, and Gluteus) via RT-qPCR. As shown in FIG. 52, all compounds except the non-ACO control siRNA (i.e., RD-12556) provided variable levels of Sod1 knockdown compared to saline treatment in the different muscle tissues ranging 21-40%, 16-37%, 12-65%, and 7-27% in the forelimb, hindlimb, nape, and gluteus, respectively. Of note, RD-12979 from Group D (2′Ome modification group) with all ACO nucleotides containing 2′Ome substitutions had enrichment for knockdown activity selectively in nape muscle tissue reducing Sod) levels by 65%. In addition, the extra PS content flanking the L9 linker in RD13180 appeared to further improve knockdown in forelimb and hindlimb tissues compared to RD-12559. Overall, these results indicate that ACO conjugation can provide knockdown activity for siRNA that is otherwise not feasible. Adopting different ODV designs may also serve as a foundation for targeting specific muscle tissues (i.e., nape) or as a general method for optimizing for potency in muscle.

### Example 28. In Vivo Knockdown Activity of ODV-siSOD1 in CNS Tissue in C57BL/6J Mice

[0624] ODV-siRNA knockdown activity was also screened in CNS tissue of adult C57BL/6J mice via unilateral ICV injection with several representatives from each of the groups of ACO design variants listed in Table 27 at a 20 mg/kg total dose. RD-12559 served as an exemplary ODV-siRNA with 5′VP modification and L9 linker with a fully-modified ACO containing 2′MOE nucleotides and PS backbone. Mice were sacrificed on day 7 following treatment and Sod1 mRNA knockdown was quantified in tissues of the brain (i.e., frontal cortex, cerebellum, and rest of brain), spinal cord (i.e., cervical, thoracic, and lumbar), and periphery (i.e., liver) via RT-qPCR. As shown in FIG. 53A, all compounds provided variable levels of Sod) knockdown compared to saline treatment in the different brain tissues ranging 30-62%, 22-63%, and 52-80% in the frontal cortex, cerebellum, and rest of brain, respectively. In the spinal cord, only RD-12967 from Group C (PS modification group) containing 2 PS modification within its ACO had little-to-no activity in all spinal cord tissues suggesting PS quantity impacts tissue biodistribution in the CNS (FIG. 53B). Excluding RD-12967, knockdown activity in the spinal cord ranged between 28-75%, 45-72%, and 40-69% in cervical, thoracic, and lumbar tissue, respectively. Knockdown in the liver measured drainage to peripheral tissue and served as a marker for CNS retention. Overall, most compounds were generally well retained in the CNS reducing Sod) levels by less than 50% except RD-13180, RD12979 and RD-13006, which measured a respective 61%, 55%, and 55% reduction in the liver (FIG. 53C). Of note, RD-13180, RD12979 and RD-13006 were also generally better performers in the CNS tissues suggesting these ODV-siRNA compounds may be better suited for broad tissue biodistribution via systemic routes of administration. For local administration, retention in the treated tissue is typically more ideal for mitigating toxicities in distal organs in context to ODV-siRNA, RD-13006 of Group I (Uracil rich group) with 7 total uracil nucleotides and RD-12979 from Group D (2′Ome modification group) containing all 2′Ome substitutions within its ACO provided an apparent balance of potency in both brain and spinal tissues with substantially less activity in liver tissue (FIG. 53A-C).

### Example 29. In Vivo Knockdown Activity of ODV-siSOD1 in C57BL/6J Mice Following Systemic Administration

[0625] ODV-siSOD1 activity was further screened in tissue following systemic administration of several representatives from the groups of ACO design variants listed in Table 27 at 20 mg/kg via IV injection RD-12559 served as an exemplary ODV-siRNA with 5′VP modification and L9 linker with fully-modified ACO containing 2′MOE nucleotides and PS backbone. Mice were sacrificed on day 7 following treatment and Sod) mRNA knockdown was quantified in tissues form heart, liver, spleen, lung, kidney, and bladder. As shown in FIG. 54A-B, ACO composition impacted distribution of knockdown activity in the analyzed tissues. In heart, knockdown was modest in which activity did not exceed 31% reductions in Sod1 levels, which was achieved by RD-12983 from Group E (ACO size group) containing an ACO at 10-nt in length (FIG. 54A). RD-13180, RD-12952, and RD-13006 measured a respective 48%, 45%, and 44% reductions in Sod1 levels compared saline control (FIG. 54A). Both RD-13180 and RD-13006 were predicted as being ideal ODV-siRNA candidates for systemic routes of administration based on CNS drainage data following ICV injection (FIG. 53C). Knockdown in spleen ranged between 0% by RD-12982 from Group E (ACO size group) and 62% by RD-12941 from Group A (Linker group) indicating ODV-siRNA design can effectively direct targeting to the spleen by linker choice and/or ACO composition (FIG. 54A). In lung, knockdown was again modest in which activity did not exceed 32% reductions in Sod1 levels, which was achieved by RD-13180 (FIG. 54B). The kidney had the greatest overall range in knockdown activity in which RD-12559, RD-13180, RD-12941 and RD-12942 reduced Sod) levels by 72%, 81%, 74%, and 70%, respectively, whereas the other tested ODV-siSOD1 compounds did not exceed 37% knockdown (FIG. 54B). Like spleen, this data suggests ODV-siRNA design can effectively direct targeting to the kidney. In bladder, detection of activity was generally similar for all ODV-siSOD1 compounds and did not exceed was 29% reductions in Sod1 levels.

### Example 30. The Preparation of Compounds of the Present Disclosure

### Compound List

[chemical structure]

### Compounds 11 and 12 Synthesis

[0626] Compounds 11 and 12 were prepared in this Example by using the following procedures.

[chemical structure]

### (1) Preparation of compound 23 and 24 from the starting compound (2S,3R,4S,5S)-2-(hydroxymethyl)-5-methoxytetrahydrofuran-3,4-diol 22

[chemical structure]

[0627] Compound 22 (4.8 g, 29 mmol, 1.0 eq) was dissolved in anhydrous DMF (200 mL) under nitrogen atmosphere. The solution was cooled to 5° C., and NaH (1.54 g, 38.6 mmol, 60% dispersion in mineral oil, 1.3 eq) was subsequently added, followed by the addition of Tetrabutylammonium bromide (TBAB) (1.87 g, 5.8 mmol, 0.2 eq) and 5-chloro-1-pentyne (3.89 mL, 36.83 mmol, 1.27 eq). The reaction mixture was allowed to stir overnight at 55° C. Then the reaction liquid was filtered and concentrated under reduced pressure. After that, water (100 mL) was added into the mixture, then extracted 3 times by ethyl acetate, the organic phase was washed 3 times by saturated lithium chloride solution. After dried by anhydrous NaSO₄ and concentrated under reduced pressure, the yellow oil formed then was directly dissolved in anhydrous pyridine (100 mL) under nitrogen atmosphere. DMTrCl (11.8 g, 34.8 mmol, 1.2 eq) was added slowly. The reaction mixture was stirred at room temperature for 6 h then concentrated under reduced pressure. The resultant residue was purified by flash chromatography (silica gel, gradient eluent: 1-30% of EtOAc/Hexane) to provide compound 23 (2.43 g, 15.7% yield) and 24 (1.49 g, 10% yield). The products were characterized with mass spectrometry and ¹H NMR.

[0628] Compound 23 MW calc: 532.25; MW Found: 555.8 [M+Na]. ¹H NMR (400 MHz, CDCl₃) δ 7.50 (dd, J=7.9, 3.8 Hz, 2H), 7.38 (dd, J=8.2, 3.4 Hz, 4H), 7.27 (d, J=6.7 Hz, 2H), 7.19-7.15 (m, 1H), 6.83-6.81 (m, 4H), 4.96-4.90 (m, 1H), 4.23 (s, 1H), 4.13-4.03 (m, 2H), 3.78 (s, 6H), 3.75 (d, J=3.3 Hz, 2H), 3.71-3.62 (m, 2H), 3.38 (s, 3H), 3.17 (t, J=5.0 Hz, 1H), 2.34-2.30 (m, 2H), 1.87-1.82 (m, 2H).

[0629] Compound 24 MW calc: 532.25; MW Found: 303.4 [DMT]⁻, 253.3 [DMT off+Na]⁺. ¹H NMR (400 MHz, CDCl₃) δ 7.52-7.46 (m, 2H), 7.40-7.34 (m, 41H), 7.29-7.26 (m, 2H), 7.21 (dd, J=8.3, 3.2 Hz, 1H), 6.83 (t, J=5.6 Hz, 4H), 4.95-4.83 (m, 1H), 4.15-4.04 (m, 3H), 3.79 (s, 6H), 3.78-3.70 (m, 2H), 3.60 (dt, J=8.5, 5.7 Hz, 1H), 3.54-3.48 (m, 1H), 3.37 (s, 3H), 3.20-3.15 (m, 1H), 2.80-2.65 (m, 1H), 2.31-2.15 (m, 2H), 1.73 (tdd, J=9.5, 6.5, 2.7 Hz, 2H).

### (2) Preparation of Compound 11 from Compound 23

[chemical structure]

[0630] To a solution of compound 23 (300 mg, 0.56 mmol, 1.0 eq) and N,N-Diisopropylethylamine (DIPEA) (139 μL, 0.84 mmol, 1.5 eq) in anhydrous DCM (5 mL) under nitrogen atmosphere was added 3-((chloro(diisopropylamino)phosphaneyl)oxy)propanenitrile (199 mg, 0.84 mmol, 1.5 eq) at room temperature. The reaction mixture was stirred for 1 h. The mixture was extracted two times with DCM, then washed with brine and dried with anhydrous Na₂SO₄. The organic layer was concentrated under reduced pressure and the resultant residue was purified with flash chromatography (silica gel, gradient eluent: 1-20% of EtOAc/Hexane, 1% Et₃N) to provide compound 11 (196 mg, 48% yield) as colorless oil.

[0631] The product was characterized with mass spectrometry and ¹H NMR. MW calc.: 732.35; MW Found: 733.2 [M+H]⁺. ¹H NMR (400 MHz, CDCl₃) δ 7.53-7.48 (m, 2H), 7.38 (dd, J=8.6, 6.4 Hz, 4H), 7.31-7.27 (m, 2H), 7.22-7.18 (m, 1H), 6.83-6.79 (m, 4H), 4.97-4.91 (m, 1H), 4.25-4.21 (m, 1H), 3.79 (s, 6H), 3.74 (dd, J=6.0, 2.8 Hz, 2H), 3.70-3.61 (m, 2H), 3.58-3.45 (m, 4H), 3.41 (s, 3H), 3.10 (dd, J=10.1, 5.2 Hz, 1H), 2.62 (dd, J=6.5, 3.5 Hz, 1H), 2.39-2.26 (m, 4H), 1.95 (dd, J=5.4, 2.6 Hz, 1H), 1.83-1.78 (m, 2H), 1.17-0.95 (m, 12H).

### (3) Preparation of Compound 12 from Compound 24

[chemical structure]

[0632] To a solution of compound 24 (300 mg, 0.56 mmol, 1.0 eq) and DIPEA (139 μL, 0.84 mmol, 1.5 eq) in anhydrous DCM (5 mL) under nitrogen atmosphere, was added 3-((chloro(diisopropylamino)phosphaneyl)oxy)propanenitrile (199 mg, 0.84 mmol, 1.5 eq) at room temperature. The reaction mixture was stirred for 1 h. The mixture was extracted two times with DCM, then washed with brine and dried with anhydrous Na₂SO₄. The organic layer was concentrated under reduced pressure and the resultant residue was purified with flash chromatography (silica gel, gradient eluent: 1-20% of EtOAc/Hexane, 1% Et₃N) to provide compound 12 (127 mg, 31% yield) as colorless oil. The product was characterized with mass spectrometry and ¹H NMR. MW calc.: 732.35; MW Found: 733.2 [M+H]⁺. ¹H NMR (400 MHz, CDCl₃) δ 7.53-7.49 (m, 2H), 7.38 (dd, J=6.3, 2.6 Hz, 4H), 7.29 (d, J=7.2 Hz, 2H), 7.22-7.19 (m, 1H), 6.85-6.81 (m, 41H), 5.02 (s, 1H), 4.20 (d, J=8.2 Hz, 1H), 4.17-3.99 (m, 2H), 3.91-3.85 (m, 1H), 3.78 (s, 6H), 3.76-3.69 (m, 2H), 3.60 (ddd, J=11.7, 8.0, 5.0 Hz, 3H), 3.41 (s, 3H), 3.12-3.07 (m, 1H), 2.64 (t, J 6.4 Hz, 2H), 2.38-2.29 (m, 1H), 2.23-2.01 (m, 2H), 1.87 (t, J=2.7 Hz, 1H), 1.68 (td, J=13.6, 6.5 Hz, 2H), 1.25-1.14 (m, 12H).

### Compound 13 Synthesis

[0633] Compound 13 was prepared in this Example by using the following procedures.

[chemical structure]

(1) Preparation of Compound 26 from the Starting Compound Diethanolamine 25.

[chemical structure]

[0634] To a solution of diethanolamine 25 (7.16 g, 68 mmol, 1.0 eq) in 110 mL of MeCN under ice bath was added anhydrous potassium carbonate (47.1 g, 341 mmol, 5.0 eq) with vigorous stirring. After 30 minutes of stirring, dropwise addition of 5-chloro-1-pentyne (7.2 mL, 68 mmol, 1.0 eq) was carried out over 5 minutes. The reaction was then left to stir for 3 days at 60° C. Then the reaction liquid was filtered and concentrated under reduced pressure, the resultant residue was purified by flash chromatography (silica gel, gradient eluent. 1-8% of MeOH/DCM) to provide compound 26 (2.85 g, 24% yield). The product was characterized with mass spectrometry and ¹H NMR. MW calc.: 171.13; MW Found: 172.3 [M+H]⁺. ¹H NMR (400 MHz, CDCl₃) δ 3.64-3.55 (m, 4H), 3.13 (s, 11H), 2.67-2.52 (m, 61H), 2.24 (td, J=6.9, 2.6 Hz, 2H), 1.73-1.61 (m, 2H).

(2) Preparation of Compound 27 from the Compound 26.

[chemical structure]

[0635] To a solution of compound 26 (2.8 g, 16.35 mmol, 1.0 eq) in 30 ml of DCM was added Et₃N (2.27 mL, 16.35 mmol, 1.0 eq) with stirring. Then the DMTrCl (4.43 g, 13.08 mmol, 0.8 eq) was added slowly. The reaction mixture was stirred at room temperature for 6 h then concentrated under reduced pressure. The residue was purified by flash chromatography (silica gel, gradient eluent: 1-3% of MeOH/DCM) to provide compound 27 (2.98 g, 48% yield). The product was characterized with mass spectrometry and ¹H NMR. MW calc.: 473.26; MW Found: 474.2 [M+H]⁺. ¹H NMR (400 MHz, CDCl₃) δ 7.44 (d, J=7.5 Hz, 2H), 7.32 (t, J=5.9 Hz, 4H), 7.29-7.24 (m, 2H), 7.20 (t, J=7.3 Hz, 1H), 6.83 (t, J=5.8 Hz, 4H), 3.78 (s, 6H), 3.53 (t, J=5.2 Hz, 2H), 3.18 (t, J=5.8 Hz, 2H), 2.69 (t, J=5.8 Hz, 2H), 2.63-2.53 (m, 4H), 2.17 (td, J=7.0, 2.6 Hz, 2H), 1.90 (t, J=2.6 Hz, 1H), 1.65 (p, J=7.0 Hz, 2H).

(3) Preparation of Compound 13 from the Compound 27.

[chemical structure]

[0636] To a solution of compound 27 (1.23 g, 2.6 mmol, 1.0 eq) and Et₃N (1.81 mL, 13 mmol, 5.0 eq) in anhydrous DCM (20 mL) under nitrogen atmosphere, was added 3-((chloro(diisopropylamino)phosphaneyl)oxy)propanenitrile (1.85 g, 7.8 mmol, 3.0 eq) at room temperature. The reaction mixture was stirred for 30 min. The mixture was extracted two times with DCM, then washed with brine and dried with anhydrous Na₂SO₄. The organic layer was concentrated under reduced pressure and the resultant residue was purified with flash chromatography (silica gel, gradient eluent 1-30% of EtOAc/Hexane, 1% Et₃N) to provide compound 13 (1.12 g, 64% yield) as yellow oil. The product was characterized with mass spectrometry and ¹H NMR. MW calc.: 673.36; MW Found: 633.2 [one isopropyl off+H]⁻. ¹H NMR (400 MHz, CDCl₃) δ7.46-7.42 (m, 2H), 7.35-7.30 (m, 4H), 7.29-7.23 (m, 2H), 7.22-7.16 (m, 1H), 6.84-6.77 (m, 4H), 3.79 (d, J=5.1 Hz, 1H), 3.78 (s, 6H), 3.62 (qdd, J=17.0, 9.1, 4.9 Hz, 4H), 3.13 (t, J=6.4 Hz, 2H), 2.75-2.70 (m, 3H), 2.57 (td, J=6.7, 1.6 Hz, 4H), 2.18 (td, J=7.1, 2.6 Hz, 2H), 2.04 (s, 1H), 1.87 (t, J=2.6 Hz, 1H), 1.62 (p, J=7.1 Hz, 2H), 1.25 (t, J=7.1 Hz, 1H), 1.16 (dd, J=11.4, 6.8 Hz, 12H).

### Compounds 14 Synthesis

[0637] Compound 14 was prepared in this Example by using the following procedures.

[chemical structure]

(1) Preparation of Compound 29 from the Starting Compound Fmoc-L-Hydroxyproline 28.

[chemical structure]

[0638] To a solution of Fmoc-L-hydroxyproline 28 (13.3 g, 37.6 mmol, 1.0 eq) in anhydrous THF (250 mL), was added borane-methyl sulfide complex (8.0 mL of 10 M in THF, 80 mmol, 2.1 eq) slowly at room temperature. The reaction mixture was stirred for 5 min at room temperature and then heated to reflux for about 1 h. Methanol (15 mL) was carefully added to the reaction mixture, which was refluxed for 15 min. After that, the reaction mixture was concentrated under reduced pressure. Then the crude products were evaporated three times with methanol (100 mL each). The crude product 29 was directly used in the next step without further purification.

(2) Preparation of Compound 30 from the Compound 29.

[chemical structure]

[0639] To a solution of compound 29 (37.6 mmol, 1.0 eq) in anhydrous pyridine (200 mL), was added DMTrCl (14 g, 41.4 mmol, 1.1 eq) slowly at ice bath. The reaction was stirred under nitrogen atmosphere overnight and then concentrated under reduced pressure. The crude product was dissolved in dry MeCN (300 mL) then the mixture was added Et₃N (15.6 mL, 113 mmol, 3.0 eq) and heated to 60° C. for 4 h. After concentrated under reduced pressure, the resulting residue was purified by flash chromatography (silica gel, gradient eluent: 1-8% of MeOH/DCM) to provide the desired product 30 (7.57 g, 48% yield) as yellow solid. The product was characterized with mass spectrometry and ¹H NMR. MW calc.: 419.21; MW Found: 303.2 [DMT]⁻. ¹H NMR (400 MHz, CDCl₃) δ7.41 (d, J=7.4 Hz, 2H), 7.30 (d, J=8.8 Hz, 4H), 7.28-7.22 (m, 2H), 7.18 (t, J=7.2 Hz, 11H), 6.80 (d, J=8.8 Hz, 4H), 4.34 (s, 1H), 3.75 (d, J=11.1 Hz, 6H), 3.60 (dd, J=12.7, 6.7 Hz, 1H), 3.10-2.92 (m, 5H), 2.86 (d, J=11.5 Hz, 1H), 1.85 (dd, J=13.5, 7.1 Hz, 1H), 1.63 (ddd, J=13.7, 7.9, 5.9 Hz, 1H).

(3) Preparation of Compound 31 from the Compound 30.

[chemical structure]

[0640] Compound 30 (500 mg, 1.19 mmol, 1.0 eq) was dissolved in 5 mL DCM, then 4-((((9H-fluoren-9-yl)methoxy)carbonyl)amino)butanoic acid (465 mg, 1.43 mmol, 1.2 eq), HBTU (903 mg, 2.38 mmol, 2.0 eq) and DIPEA (671 uL, 4.05 mmol, 3.4 eq) were added into the reaction under nitrogen atmosphere. The reaction mixture was stirred overnight at room temperature. Then 10 mL H₂O was added into the reaction, the mixture was extracted by DCM (3*10 mL) and the organic phase was combined, dried over Na₂SO₄, and concentrated. The resulting residue was purified by flash chromatography (silica gel, gradient eluent: 1-5% of MeOH/DCM) to provide the desired product 31 (740 mg, 85% yield) as yellow solid. The product was characterized with mass spectrometry and ¹H NMR. MW calc.: 726.33; MW Found: 425.2 [DMT off+H]⁺. ¹H NMR (400 MHz, CDCl₃) δ 7.74 (d, J=7.5 Hz, 2H), 7.58 (d, J=7.4 Hz, 2H), 7.38 (t, J=7.4 Hz, 2H), 7.32-7.23 (m, 7H), 7.24-7.10 (m, 4H), 6.88-6.72 (m, 4H), 4.52-4.25 (m, 4H), 4.18 (t, J=6.8 Hz, 1H), 3.78 (s, 6H), 3.52-3.38 (m, 3H), 3.27-3.10 (m, 3H), 2.42-2.19 (m, 2H), 2.04 (dd, J=13.6, 7.5 Hz, 1H), 1.84 (d, J=6.5 Hz, 1H), 1.69 (ddd, J=13.6, 9.1, 4.5 Hz, 1H), 1.48-1.27 (m, 2H).

(4) Preparation of Compound 14 from the Compound 31.

[chemical structure]

[0641] To a solution of compound 31 (400 mg, 0.55 mmol, 1.0 eq) and Et₃N (382 μL, 2.75 mmol, 5.0 eq) in anhydrous DCM (5 mL) under nitrogen atmosphere, was added 3-((chloro(diisopropylamino)phosphaneyl)oxy)propanenitrile (390 mg, 1.65 mmol, 3.0 eq) at room temperature. The reaction mixture was stirred for 1 h. The mixture was extracted two times with DCM, then washed with brine and dried with anhydrous Na₂SO₄. The organic layer was concentrated under reduced pressure and the resultant residue was purified with flash chromatography (silica gel, gradient eluent: 1-3% of MeOH/DCM, 1% Et₃N) to provide compound 14 (420 mg, 82% yield) as yellow oil. The product was characterized with mass spectrometry and ¹H NMR MW calc.: 926.44, MW Found 403.3 [DMT and Fmoc off+H]⁺. ¹H NMR (400 MHz, CDCl₃) δ 7.75 (d, J=7.5 Hz, 2H), 7.56 (d, J=7.4 Hz, 2H), 7.36 (t, J=7.4 Hz, 2H), 7.31-7.22 (m, 7H), 7.25-7.12 (m, 4H), 6.88-6.70 (m, 4H), 4.53-4.27 (m, 4H), 4.17 (t, J=6.8 Hz, 1H), 3.78 (s, 6H), 3.51-3.39 (m, 3H), 3.26-3.11 (m, 3H), 3.05 (t, J=6.4 Hz, 2H), 2.57 (td, J=6.7, 1.6 Hz, 4H), 2.41-2.18 (m, 2H), 2.05 (dd, J=13.6, 7.5 Hz, 1H), 1.85 (d, J=6.5 Hz, 1H), 1.67 (ddd, J=13.6, 9.1, 4.5 Hz, 1H), 1.47-1.28 (m, 2H), 1.16 (dd, J=11.4, 6.8 Hz, 12H).

[0642] All compounds in this example are listed in Table 1.

### General Synthesis Method of Oligonucleotide.

### Single Strand Synthesis Method

[0643] The single strand oligonucleotide was synthesized on a K&A DNA synthesizer (K&A Laborgeraete GbR, chaafheim, Germany) by a solid phase synthesis technique.

[0644] The starting material was universal solid support or special solid support commercially available or synthesis as disclosure in previous context. In general, phosphoramidite monomers including various linkers and conjugates (0.1M in acetonitrile or dichloromethane), were added sequentially onto a solid support in the DNA synthesizer to generate the desired full-length oligonucleotides. Each cycle of amidite addition consisted of four chemical reactions including detritylation, coupling, oxidation/thiolation and capping. In first step, the detritylation was performed by using 3% dichloroacetic acid (TCA) in DCM for 45 seconds. In the second step, Phosphoramidite coupling was conducted for 6 minutes for all amidites by 12 eq.; In the third step, oxidation was performed by using 0.02 M iodine in THF:pyridine:water (70:20:10, v/v/v) for 1 minute; if phosphorothioate modification needed then replace oxidation by thiolation which was carried out with 0.1 M solution of xanthane hydride in pyridine:ACN (50:50, v/v) for 3 minutes; In the fourth step, the capping was performed by using a THF acetic anhydride Pyridine (80:10:10, v/v/v) (CAP A) and N-methylimidazole:THF (10:90, v/v), (CAP B) for 20 seconds. The Cycles of four chemical reaction will be depended by the length of single of oligonucleotide.

[0645] Deprotection 1 (Nucleobase Deprotection): After completion of the synthesis, the solid support was transferred to a screw-cap microcentrifuge tube. For a 1 μmol synthesis scale, 1 ml of a mixture of methylamine and ammonium hydroxide was added. The tube containing the solid support was then heated in an oven at 60° C. to 65° C. for 15 min and then allowed to cool to room temperature. The cleavage solution was collected and evaporated to dryness in a speedvac to provide crude single strand of oligonucleotide.

[0646] Deprotection II (Removal of 2′-TBDMS Group): If The crude RNA oligonucleotide, still carrying the 2′-TBDMS groups, then dissolved in 0.1 ml of DMSO. After adding 1 ml of Triethylamine trihydrofluoride, the tube was capped, and the mixture was shaken vigorously to ensure complete dissolution and then heated in an oven at 65° C. for 15 minutes. The tube was removed from the oven and cooled down to room temperature. The solution containing the completely desilylated oligonucleotide was cooled on dry ice. 2 ml of ice-cold n-butanol (−20° C.) were carefully added in 0.5 ml portions to precipitate the oligonucleotides. The precipitate was filtered, washed with 1 mL ice-cold n-butanol, and subsequently dissolved in 0.01 M Tris(hydroxymethyl)aminomethanol hydrochloride buffer.

### Single Strand Purification

[0647] The purification of oligonucleotides was performed on an AKTA explorer 10 equipped with a Source 15Q 4.6/100 PE column using the following conditions: buffer A: (10 mM Tris-HCl, 1 mM EDTA, pH 7.5), B: (10 mM Tris-HCl, 1 mM EDTA, 2M NaCl, pH 7.5), gradient: 10% B to 60% B in 25 min, flow rate: 1 mL/min. The pure oligonucleotides were collected and desalting by a HiPrep 26/10 Desalting column.

### Annealing to Form Duplex

[0648] For duplex, after the generation of desalted purified single strand solutions, Passenger strand and Guide strand were mixed by equal volumes at equimolar concentration in the tube Place the tube in a heatblock at 95° C. for 5 min and then cool to room temperature then were subsequently lyophilized to powder.

[0649] All oligo synthesis were manufactured following General synthesis method of oligonucleotide.

### General Conjugate Reaction and Click Chemistry

[0650] Single strand of SS1, SS3, SS6, SS7, SS8 were synthesized by following single strand synthesis method. After purification, they were conjugated with terminal alkyne or azide to from click chemistry. All single strands in this example are listed in Table 31.

[chemical structure]

### Example 31. Preparation of RD-13351 by Click Chemistry

### (1) Preparation of Azido Conjugate Single Strand SS2

[chemical structure]

[0651] To a solution of 6-azidohexanoic acid (100 mg, 0.64 mmol, 1.0 eq) and EDCI (245 mg, 1.28 mmol, 2.0 eq) in anhydrous DCM (5 mL) under nitrogen atmosphere, was added 1-hydroxypyrrolidine-2,5-dione (147 mg, 1.28 mmol, 2.0 eq) at room temperature. The reaction mixture was stirred overnight and extracted two times with DCM, then washed with brine and dried with anhydrous Na₂SO₄. The organic layer was concentrated under reduced pressure to provide the crude compound 32 used directly in next step without purification.

[0652] The single strand of SS1 (3.68 mg, 0.65 umol, 1.0 eq) was dispersed in 800 μL dd water. Then 89 μL 1M NaHCO₃ solution and a stock solution of 32 (123 μL of 28 mg/mL DMSO stock solution, 21 eq) were added. Two hours later, 5 M NaCl (10% by volume, 101 μL) and cold ethanol (2.2 mL) were added to this reaction, then this mixture was stored in −20° C. refrigerator for 1 h to precipitate the RNA. Then the RNA precipitate was diluted to 1 mL dd water and subjected to Millipore Amicon Ultra-15 Centrifugal Filter Units (3000-MW cutoff). The ultrafiltrate was concentrated under reduced pressure and then purified by HPLC to afford azido conjugate single strand of SS2 (0.27 umol, 41% yield). The product was characterized with mass spectrometry MW calc. 5827; MW Found: 5828.7

### (2) Preparation of DBCO Conjugate Single Strand SS4

[chemical structure]

[0653] To a solution of 11,12-Didehydro-gamma-oxodibenzo[b,f]azocine-5(6H)-butanoic (DBCO) Acid (150 mg, 0.49 mmol, 1.0 eq) and EDCI (188 mg, 0.98 mmol, 2.0 eq) in anhydrous DCM (5 mL) under nitrogen atmosphere, was added 1-hydroxypyrrolidine-2,5-dione (113 mg, 0.98 mmol, 2.0 eq) at room temperature. The reaction mixture was stirred overnight and extracted two times with DCM, then washed with brine and dried with anhydrous Na₂SO₄. The organic layer was concentrated under reduced pressure to provide the DBCO derivative 33.

[0654] The single strand SS3 (18 mg, 2.7 μmol, 1.0 eq) was dispersed in 2700 μL dd water. Then 300 μL 1M NaHCO₃ solution and a stock solution of compound 33 (530 μL of 43 mg/nL DMSO stock solution, 21 eq) were added. Two hours later, 5 M NaCl (10% by volume, 353 μL) and cold ethanol (7.8 mL) were added to this reaction, then this mixture was stored in −20° C. refrigerator for 1 h to precipitate the RNA. Then the RNA precipitate was diluted to 2 mL dd water and subjected to Millipore Amicon Ultra-15 Centrifugal Filter Units (3000-MW cutoff). The ultrafiltrate was concentrated under reduced pressure and then purified by HPLC to afford DBCO conjugate single stand SS4 (0.28 μmol, 10% yield). The product was characterized with mass spectrometry. MW calc.: 6968, MW Found: 6970.1.

### (1) Preparation of Passenger Strand SS5 by Click Chemistry

[chemical structure]

[0655] DBCO conjugate SS4 (35 nmol) and azido conjugate SS2 (14 nmol) were mixed in a NaCl solution (0.2 M, 221 μL) containing EDTA (0.5 M, 2.8 μL) and HEPES (0.1 M, pH 7.5, 56 μL) and were heated for 5 min to 95° C. then cooled to room temperature by 1° C./min and left for 2 hi at room temperature. The mixture was subjected to Millipore Amicon Ultra-15 Centrifugal Filter Units (3000-MW cutoff). The ultrafiltrate was concentrated under reduced pressure and then purified by HPLC to form SS5 (8.4 μmol, 60% yield). The product was characterized with mass spectrometry. MW calc.: 12795; MW Found: 12797.3 Passenger strand SS5 was annealing with guide (antisense) strand to form a duplex RD-13351. The single strands in this example are listed in Table 31. The linkers in Example are listed in Table 1.

TABLE 31
Sequences used in Example 31

| Name of | | |
|---|---|---|
| single | | |
| strand and | | |
| duplex | SEQ ID NO | Sequences (5′-3′) |
| SS1 | 1299 | meU*meU*meG*meU*meA*meU*meU*meC*meU*meA*meU*meG*meU* |
| | | meU |
| SS3 | 1380 | mA*fG*mGfUmG-C6x7-mAfAfAfUfGfAmAfGmAfAmAfG*mU*fA |
| SS6 | 1291 | mA*fG*mGfUmG-C6x1-mAfAfAfUfGfAmAfGmAfAmAfG*mU*fA |
| SS7 | 1292 | mA*fG*mGfUmG-C6x2-mAfAfAfUfGfAmAfGmAfAmAfG*mU*fA |
| SS8 | 1293 | mA*fG*mGfUmG-C6x5-mAfAfAfUfGfAmAfGmAfAmAfG*mU*fA |
| RD-13351 | 1294 | mA*fG*mGfUmG-(C6x7- |
| | | meU*meU*meG*meU*meA*meU*meU*meC*meU*meA*meU*meG*meU* |
| | | meU)-mAfAfAfUfGfAmAfGmAfAmAfG*mU*fA |
| | 57 | VPmU*fA*mCfUmUfUmCfUmUfCmAfUmUfUmCfCmAfCmCfU*mU*fU |

n.b.: upper case, RNA; *, phosphorothioate (PS) backbone modification; me, 2′-O-methoxyethyl (2′MOE); m, 2′-O-methyl (2′-OMe); me, 2′-O-methoxyethyl (2′MOE); f, 2′-fluoro; VP, 5′-(E)-vinylphosphonate, C, 5′-methyl cytosine; U, 5′-methyl uracil; C6x1, C6x1 linker; C6x2, C6x2 linker; C6x5, C6x5 linker; C6x7, C6x7 linker.

### Example 32. Assessment of Knockdown Activity and Cytotoxicity of ODV-siSOD1 with Internally Conjugated ACOs in PMH Cells

[0656] ODV-siSOD1 compounds were synthesized with ACO sequence conjugated via C6x7 linker at nucleotide position 6 internal to the passenger strand (see Table 31). To test the impact internal ASO conjugation had on siRNA activity, internal conjugate ODV-siRNA (iODV-siRNA) RD-13351 was compared to parental siRNA without ACO conjugate (i.e., RD-12556) and conventional ODV-siRNA variant with its 3′-terminal ACO (i.e., RD-12559). ODV-siRNA sequence composition is also listed in Table 30. Sod1 levels were assessed via RT-qPCR to quantify knockdown activity at escalating concentrations (i.e., 0.000005, 0.00002, 0.00006, 0.0024, 0.0098, 0.039, 0.156, 0.625, 2.5 and 10 nM) in PMH cells 24 hours after transfection using Lipofectamine RNAiMax. Plotting knockdown activity generated dose response curves in which IC₅₀ values were extrapolated to define potency for each of the tested siRNAs (FIG. 55A). As summarized in Table 32, neither potency nor activity were impaired by internal conjugation of the ACO. Cell viability via CCK8 assay was also assessed at escalating doses (i.e., 6.25, 25, 100, and 400 nM) as a marker for cytotoxicity. As shown in FIG. 55B, no significant changes in cell viability were detected up to 400 nM indicating internal conjugation of ACO did not alter in vitro cytotoxicity.

TABLE 32
IC₅₀ and Emax values of ODV-siRNA in PMH cells

| siRNAs | IC₅₀ (nM) | Emax knockdown activity (%) |
|---|---|---|
| RD-12556 | 0.01572 | 97 |
| RD-12559 | 0.00891 | 98 |
| RD-13351 | 0.01616 | 98 |

[0657] Free uptake of iODV-siRNA (i.e., RD-13351) was subsequent tested in comparison to conventional ODV-siRNAs (i.e., RD-12559 and RD-13180) at escalating concentrations (i.e., 0.02, 0.1, 0.39, 1.56, 6.25, 25, 100, 400, and 1600 nM) in PMH cells. Sod1 levels were assessed via RT-qPCR to quantify knockdown activity 3 days after treatment in which data was plotted to generated dose response curves to extrapolate IC₅₀ values (FIG. 55C). As shown in Table 33, both potency and activity were similar for iODV-siRNA compared to both conventional ODV-siRNA compounds. Cell viability was also assessed at three doses (i.e., 100, 400, and 1600 nM) to determine cytotoxicity as consequence of free uptake. As shown in FIG. 55D, no differences in cell viability were detected up to 1600 nM supporting that the iODV-siRNA structure does not alter cytotoxicity in comparison to 3′-terminal ACO conjugation. Taken together, these results indicate that internal conjugation of ACO sequence is well-tolerated for ODV-siRNA.

TABLE 33
IC₅₀ and Emax values of following free-uptake
of ODV-siRNAs in PMH cells

| siRNAs | IC₅₀ (nM) | Emax knockdown activity (%) |
|---|---|---|
| RD-12559 | 6.977 | 68 |
| RD-13180 | 3.382 | 65 |
| RD-13351 | 3.086 | 69 |

TABLE 27
List of novel ODV designs

| | | Name of | | | | | | Knockdown | |
|---|---|---|---|---|---|---|---|---|---|
| | | ODV | | | | | | activity | |
| | | compound | | | SEQ | | | (%) of ODV | |
| Design | | that uses | | | ID | | Size | compound | |
| group | Variable | the design | Design | Linker | NO | ACO sequence (5′-3′) used in ODV compound | (bp) | 0.1 μM | 1 μM |
| Control | n/a | RD-12556 | Duplex control | n/a | / | n/a | n/a | 39.25 | 67.50 |
| | n/a | RD-12559 | ODV positive | S9 | 1299 | meU*meU*meG*meU*meA*meU*meU*meC*meU*meA*meU*meG*meU | 14 | 77.70 | 91.00 |
| | | | control | | | *meU | | | |
| A | Linker | RD-12941 | Linker (S18) | S18 | 1299 | meU*meU*meG*meU*meA*meU*meU*meC*meU*meA*meU*meG*meU | 14 | 84.70 | 97.75 |
| | | | | | | *meU | | | |
| | | RD-12942 | Linker (C6) | C6 | 1299 | meU*meU*meG*meU*meA*meU*meU*meC*meU*meA*meU*meG*meU | 14 | 89.95 | 97.45 |
| | | | | | | *meU | | | |
| | | RD-12943 | Linker (UUACA) | UUACA | 1299 | meU*meU*meG*meU*meA*meU*meU*meC*meU*meA*meU*meG*meU | 14 | 58.35 | 93.75 |
| | | | | | | *meU | | | |
| | | RD-12944 | Linker (UUCUU) | UUCUU | 1299 | meU*meU*meG*meU*meA*meU*meU*meC*meU*meA*meU*meG*meU | 14 | 60.80 | 92.95 |
| | | | | | | *meU | | | |
| | | RD-12945 | Linker (C3) | C3 | 1299 | meU*meU*meG*meU*meA*meU*meU*meC*meU*meA*meU*meG*meU | 14 | 89.15 | 97.75 |
| | | | | | | *meU | | | |
| | | RD-12947 | Linker (d Spacer) | d Spacer | 1299 | meU*meU*meG*meU*meA*meU*meU*meC*meU*meA*meU*meG*meU | 14 | 87.75 | 96.65 |
| | | | | | | *meU | | | |
| | | RD-12948 | Linker (C12) | C12 | 1299 | meU*meU*meG*meU*meA*meU*meU*meC*meU*meA*meU*meG*meU | 14 | 96.60 | 98.55 |
| | | | | | | *meU | | | |
| | | RD-12949 | Linker (L14) | L14 | 1299 | meU*meU*meG*meU*meA*meU*meU*meC*meU*meA*meU*meG*meU | 14 | 90.30 | 97.60 |
| | | | | | | *meU | | | |
| | | RD-12950 | Linker (L15) | L15 | 1299 | meU*meU*meG*meU*meA*meU*meU*meC*meU*meA*meU*meG*meU | 14 | 87.15 | 98.50 |
| | | | | | | *meU | | | |
| | | RD-12951 | Linker (L16) | L16 | 1299 | meU*meU*meG*meU*meA*meU*meU*meC*meU*meA*meU*meG*meU | 14 | 87.95 | 98.50 |
| | | | | | | *meU | | | |
| B | Palindrome | RD-12952 | 5′-UUGUAUUCUUGUAU-3′ | L9 | 1300 | meU*meU*meG*meU*meA*meU*meU*meC*meU*meU*meG*meU*meA | 14 | 87.55 | 98.55 |
| | | | | | | *meU | | | |
| | | RD-12953 | 5′-UAUGUUUCUAUGUU-3′ | L9 | 1301 | meU*meA*meU*meG*meU*meU*meU*meC*meU*meA*meU*meG*meU | 14 | 87.05 | 97.10 |
| | | | | | | *meU | | | |
| | | RD-12954 | 5′-UUGUAUCUUAUGUU-3′ | L9 | 1302 | meU*meU*meG*meU*meA*meU*meC*meU*meU*meA*meU*meG*meU | 14 | 89.05 | 97.45 |
| | | | | | | *meU | | | |
| | | RD-12955 | 5′-UUGUAUUAUGUU-3′ | L9 | 1303 | meU*meU*meG*meU*meA*meU*meU*meA*meU*meG*meU*meU | 12 | 84.85 | 98.65 |
| | | RD-12956 | 5′-UUGUAUCCUAUGUU-3′ | L9 | 1304 | meU*meU*meG*meU*meA*meU*meC*meC*meC*meU*meA*meG*meU | 14 | 88.15 | 96.25 |
| | | | | | | *meU | | | |
| | | RD-12957 | 5′-UUGUAU-3′ | L9 | 1305 | meU*meU*meG*meU*meA*meU | 6 | 71.15 | 90.45 |
| | | RD-12958 | 5′-UUGUAUUC-3′ | L9 | 1306 | meU*meU*meG*meU*meA*meU*meU*meC | 8 | 72.25 | 95.35 |
| | | RD-12959 | 5′-UUGUAUUCUAU-3′ | L9 | 1307 | meU*meU*meG*meU*meA*meU*meU*meC*meU*meA*meU | 11 | 76.10 | 92.30 |
| | | RD-12960 | 5′-UUGUAUAGUAUGUU-3′ | L9 | 1308 | meU*meU*meG*meU*meA*meU*meA*meG*meU*meA*meU*meG*meU | 14 | 87.35 | 96.40 |
| | | | | | | *meU | | | |
| | | RD-12961 | 5′-UAGUAUUCUAUGAU-3′ | L9 | 1309 | meU*meA*meG*meU*meA*meU*meU*meC*meU*meA*meU*meG*meA | 14 | 83.70 | 96.05 |
| | | | | | | *meU | | | |
| | | RD-12962 | 5′-UACUAUUCUAUCAU-3′ | L9 | 1310 | meU*meA*meC*meU*meA*meU*meU*meC*meU*meA*meU*meC*meA | 14 | 77.10 | 92.95 |
| | | | | | | *meU | | | |
| | | RD-12963 | 5′-UACAUAUCAUACAU-3′ | L9 | 1311 | meU*meA*meC*meA*meU*meA*meU*meC*meA*meU*meA*meC*meA | 14 | 78.00 | 92.60 |
| | | | | | | *meU | | | |
| | | RD-12964 | 5′-UUAUAUUCUAUAUU-3′ | L9 | 1312 | meU*meU*meA*meU*meA*meU*meU*meC*meU*meA*meU*meA*meU | 14 | 80.20 | 92.45 |
| | | | | | | *meU | | | |
| | | RD-12965 | 5′-UUAUAUUCUAUGUU-3′ | L9 | 1313 | meU*meU*meA*meU*meA*meU*meU*meC*meU*meA*meU*meG*meU | 14 | 86.40 | 97.60 |
| | | | | | | *meU | | | |
| | | RD-12966 | 5′-UAGUAUUCUAUGUU-3′ | L9 | 1314 | meU*meA*meG*meU*meA*meU*meU*meC*meU*meA*meU*meG*meU | 14 | 82.70 | 95.25 |
| | | | | | | *meU | | | |
| C | PS | RD-12967 | 2 PS backbone | L9 | 1315 | meU*meUmeGmeUmeAmeUmeUmeCmeUmeAmeUmeGmeU*meU | 14 | 54.05 | 81.50 |
| | modifi- | RD-12968 | 4 PS backbone | L9 | 1316 | meU*meU*meGmeUmeAmeUmeUmeCmeUmeAmeUmeG*meU*meU | 14 | 59.45 | 84.30 |
| | cation | RD-12969 | 6 PS backbone | L9 | 1317 | meU*meU*meG*meUmeAmeUmeUmeCmeUmeAmeU*meG*meU*meU | 14 | 64.70 | 88.35 |
| | | RD-12970 | 8 PS backbone | L9 | 1318 | meU*meU*meG*meU*meAmeUmeUmeCmeUmeA*meU*meG*meU*meU | 14 | 71.55 | 89.55 |
| | | RD-12971 | 10 PS backbone | L9 | 1319 | meU*meU*meG*meU*meA*meUmeUmeCmeU*meA*meU*meG*meU*me | 14 | 79.10 | 92.25 |
| | | | | | | U | | | |
| | | RD-12972 | 12 PS backbone | L9 | 1320 | meU*meU*meG*meU*meA*meU*meU*meC*meU*meA*meU*meG*meU* | 14 | 82.80 | 94.15 |
| | | | | | | meU | | | |
| D | 2′-Ome | RD-12973 | 2-2′Ome | L9 | 1321 | meU*meU*meG*meU*meA*meU*mU*mC*meU*meA*meU*meG*meU* | 14 | 84.45 | 93.70 |
| | modifi- | | | | | meU | | | |
| | cation | RD-12974 | 4-2′Ome | L9 | 1322 | meU*meU*meG*meU*meA*mU*mU*mC*mU*meA*meU*meG*meU*me | 14 | 86.95 | 96.50 |
| | | | | | | U | | | |
| | | RD-12975 | 6-2′Ome | L9 | 1323 | meU*meU*meG*meU*mA*mU*mU*mC*mU*mA*meU*meG*meU*meU | 14 | 84.05 | 96.60 |
| | | RD-12976 | 8-2′Ome | L9 | 1324 | meU*meU*meG*mU*mA*mU*mU*mC*mU*mA*mU*meG*meU*meU | 14 | 85.20 | 97.50 |
| | | RD-12977 | 10-2′Ome | L9 | 1325 | meU*meU*mG*mU*mA*mU*mU*mC*mU*mA*mU*mG*meU*meU | 14 | 87.05 | 98.50 |
| | | RD-12978 | 12-2′Ome | L9 | 1326 | meU*mU*mG*mU*mA*mU*mU*mC*mU*mA*mU*mG*mU*meU | 14 | 89.70 | 98.05 |
| | | RD-12979 | 14-2′Ome | L9 | 1327 | mU*mU*mG*mU*mA*mU*mU*mC*mU*mA*mU*mG*mU*mU | 14 | 90.35 | 98.30 |
| E | ACO size | RD-12980 | ACO size: 13-nt | L9 | 1328 | meU*meU*meG*meU*meA*meU*meU*meC*meU*meA*meU*meG*meU | 13 | 83.95 | 94.70 |
| | | RD-12981 | ACO size: 12-nt | L9 | 1329 | meU*meU*meG*meU*meA*meU*meU*meC*meU*meA*meU*meG | 12 | 77.90 | 93.50 |
| | | RD-12982 | ACO size: 11-nt | L9 | 1330 | meU*meU*meG*meU*meA*meU*meU*meC*meU*meA*meU | 11 | 81.30 | 93.20 |
| | | RD-12983 | ACO size: 10-nt | L9 | 1331 | meU*meU*meG*meU*meA*meU*meU*meC*meU*meA | 10 | 67.65 | 90.95 |
| | | RD-12984 | ACO size: 9-nt | L9 | 1332 | meU*meU*meG*meU*meA*meU*meU*meC*meU | | 66.70 | 88.90 |
| | | RD-12985 | ACO size: 8-nt | L9 | 1333 | meU*meU*meG*meU*meA*meU*meU*meC | 00 | 65.95 | 89.10 |
| | | RD-12986 | ACO size: 7-nt | L9 | 1334 | meU*meU*meG*meU*meA*meU*meU | | 60.65 | 88.60 |
| | | RD-12987 | ACO size: 6-nt | L9 | 1335 | meU*meU*meG*meU*meA*meU | 0 | 60.30 | 89.75 |
| F | Adenine | RD-12988 | Adenine rich: 5-nt | L9 | 1336 | meC*meG*meG*meA*meA*meG*meU*meA*meC*meC*meC*meA*meA | 14 | 74.25 | 88.50 |
| | rich | | | | | *meC | | | |
| | | RD-12989 | Adenine rich: 6-nt | L9 | 1337 | meA*meA*meU*meA*meA*meC*meU*meA*meC*meG*meU*meG*meU | 14 | 83.90 | 94.25 |
| | | | | | | *meA | | | |
| | | RD-12990 | Adenine rich: 7-nt | L9 | 1338 | meA*meA*meU*meA*meC*meG*meA*meA*meA*meC*meC*meU*meG | 14 | 79.75 | 95.20 |
| | | | | | | *meA | | | |
| | | RD-12991 | Adenine rich: 8-nt | L9 | 1339 | meA*meC*meG*meA*meC*meA*meU*meC*meA*meA*meA*meU*meA | 14 | 71.40 | 92.80 |
| | | | | | | *meA | | | |
| | | RD-12992 | Adenine rich: 9-nt | L9 | 1340 | meA*meA*meA*meU*meA*meA*meU*meA*meA*meG*meA*meA*meC | 14 | 77.95 | 94.95 |
| | | | | | | *meG | | | |
| G | Cytosine | RD-12993 | Cytosine rich: 5-nt | L9 | 1341 | meC*meC*meA*meA*meC*meC*meA*meU*meC*meG*meG*meA*meU | 14 | 68.75 | 89.85 |
| | rich | | | | | *meU | | | |
| | | RD-12994 | Cytosine rich: 6-nt | L9 | 1342 | meC*meG*meU*meC*meC*meC*meU*meC*meG*meG*meG*meG*meA | 14 | 67.10 | 85.45 |
| | | | | | | *meC | | | |
| | | RD-12995 | Cytosine rich: 7-nt | L9 | 1343 | meC*meC*meA*meA*meA*meC*meC*meG*meC*meA*meG*meC*meU | 14 | 68.15 | 84.45 |
| | | | | | | *meC | | | |
| | | RD-12996 | Cytosine rich: 8-nt | L9 | 1344 | meC*meG*meC*meC*meA*meC*meC*meC*meU*meC*meU*meG*meG* | 14 | 68.80 | 86.10 |
| | | | | | | meC | | | |
| | | RD-12997 | Cytosine rich: 9-nt | L9 | 1345 | meC*meA*meC*meC*meC*meC*meC*meC*meA*meC*meA*meU*meC* | 14 | 65.90 | 83.05 |
| | | | | | | meG | | | |
| | | RD-12998 | Cytosine rich: 10-nt | L9 | 1346 | meC*meC*meG*meC*meU*meC*meC*meC*meC*meC*meC*meU*meA* | 14 | 60.45 | 80.65 |
| | | | | | | meC | | | |
| H | Guanine | RD-12999 | Guanine rich: 5-nt | L9 | 1347 | meG*meG*meC*meA*meC*meA*meA*meG*meG*meA*meU*meU*meC | 14 | 78.50 | 95.40 |
| | rich | | | | | *mG | | | |
| | | RD-13000 | Guanine rich: 6-nt | L9 | 1348 | meG*meG*meU*meG*meU*meG*meG*meA*meA*meG*meC*meC*meU | 14 | 74.65 | 93.65 |
| | | | | | | *meA | | | |
| | | RD-13001 | Guanine rich: 7-nt | L9 | 1349 | meG*meA*meG*meU*meU*meC*meG*meG*meA*meU*meG*meG*meG | 14 | 78.15 | 95.55 |
| | | | | | | *meC | | | |
| | | RD-13002 | Guanine rich: 8-nt | L9 | 1350 | meG*meA*meG*meC*meG*meG*meG*meG*meU*meG*meC*meG*meC | 14 | 75.45 | 93.20 |
| | | | | | | *meC | | | |
| | | RD-13003 | Guanine rich: 9-nt | L9 | 1351 | meG*meG*meU*meG*meG*meG*meC*meG*meU*meC*meG*meG*meU | 14 | 78.30 | 94.25 |
| | | | | | | *meG | | | |
| I | Uracil | RD-13004 | Uracil rich: 5-nt | L9 | 1352 | meU*meG*meG*meG*meU*meA*meG*meG*meU*meC*meU*meC*meG | 14 | 78.20 | 93.15 |
| | rich | | | | | *meU | | | |
| | | RD-13005 | Uracil rich: 6-nt | L9 | 1353 | meU*meU*meG*meU*meC*meC*meG*meU*meU*meC*meG*meC*meU | 14 | 85.25 | 95.55 |
| | | | | | | *meA | | | |
| | | RD-13006 | Uracil rich: 7-nt | L9 | 1354 | meU*meA*meU*meG*meU*meC*meG*meU*meA*meU*meU*meG*meU | 14 | 85.75 | 98.50 |
| | | | | | | *meA | | | |
| | | RD-13007 | Uracil rich: 8-nt | L9 | 1355 | meU*meA*meU*meU*meG*meC*meU*meC*meG*meC*meU*meU*meU | 14 | 84.50 | 93.05 |
| | | | | | | *meU | | | |
| | | RD-13008 | Uracil rich: 9-nt | L9 | 1356 | meU*meU*meU*meC*meG*meU*meU*meU*meG*meC*meU*meG*meU | 14 | 84.10 | 97.40 |
| | | | | | | *meU | | | |
| | | RD-13009 | Uracil rich: 10-nt | L9 | 1357 | meU*meG*meU*meU*meA*meC*meG*meU*meU*meU*meU*meU*meU | 14 | 85.95 | 96.75 |
| | | | | | | *meU | | | |
| J | Purine | RD-13010 | Purines rich: 9a | L9 | 1358 | meG*meG*meG*meU*meU*meA*meA*meA*meA*meC*meC*meC*meG | 14 | 69.75 | 92.30 |
| | rich | | | | | *mG | | | |
| | | RD-13011 | Purines rich: 9b | L9 | 1359 | meA*meA*meC*meG*meA*meA*meC*meC*meG*meA*meG*meU*meG | 14 | 84.65 | 96.10 |
| | | | | | | *meU | | | |
| | | RD-13012 | Purines rich: 9c | L9 | 1360 | meU*meG*meC*meA*meU*meC*meG*meG*meA*meU*meG*meA*meA | 14 | 83.90 | 95.20 |
| | | | | | | *meA | | | |
| | | RD-13013 | Purines rich: 10a | L9 | 1361 | meA*meC*meG*meG*meA*meA*meG*meA*meG*meG*meC*meG*meC | 14 | 85.50 | 96.90 |
| | | | | | | *meC | | | |
| | | RD-13014 | Purines rich: 10b | L9 | 1362 | meG*meU*meA*meA*meG*meU*meA*meC*meG*meC*meA*meG*meG | 14 | 83.25 | 97.80 |
| | | | | | | *meG | | | |
| | | RD-13015 | Purines rich: 10c | L9 | 1363 | meG*meU*meA*meA*meA*meG*meU*meG*meA*meG*meC*meA*meU | 14 | 83.55 | 99.55 |
| | | | | | | *meA | | | |
| | | RD-13016 | Purines rich: Ila | L9 | 1364 | meA*meA*meU*meA*meG*meA*meG*meC*meG*meA*meG*meG*meA | 14 | 86.70 | 98.25 |
| | | | | | | *meU | | | |
| | | RD-13017 | Purines rich: 11b | L9 | 1365 | meC*meG*meC*meA*meG*meA*meG*meA*meA*meU*meG*meA*meA | 14 | 82.80 | 97.80 |
| | | | | | | *meA | | | |
| K | Pyrimidine | RD-13018 | Pyrimidines rich: 9a | L9 | 1366 | meU*meG*meC*meG*meU*meC*meG*meA*meA*meU*meU*meC*meU | 14 | 81.05 | 95.40 |
| | rich | | | | | *mC | | | |
| | | RD-13019 | Pyrimidines tich: 9b | L9 | 1367 | meU*meC*meA*meC*meU*meU*meA*meU*meG*meC*meA*meC*meG | 14 | 81.35 | 94.35 |
| | | | | | | *meC | | | |
| | | RD-13020 | Pyrimidines rich: 9c | L9 | 1368 | meC*meC*meU*meU*meA*meU*meU*meA*meC*meA*meG*meA*meU | 14 | 79.50 | 94.70 |
| | | | | | | *meC | | | |
| | | RD-13021 | Pyrimidines rich: 10a | L9 | 1369 | meU*meU*meC*meC*meC*meC*meU*meU*meG*meA*meU*meA*meA | 14 | 82.45 | 94.70 |
| | | | | | | *mC | | | |
| | | RD-13022 | Pyrimidines rich: 10b | L9 | 1370 | meC*meC*meU*meU*meU*meU*meC*meU*meA*meG*meA*meU*meC | 14 | 75.70 | 93.30 |
| | | | | | | *meG | | | |
| | | RD-13023 | Pyrimidines rich: 11a | L9 | 1371 | meU*meC*meC*meU*meG*meU*meC*meC*meA*meU*meC*meC*meU | 14 | 70.60 | 89.05 |
| | | | | | | *meA | | | |
| | | RD-13024 | Pyrimidines rich: 11b | L9 | 1372 | meU*meU*meC*meU*meA*meU*meG*meU*meG*meC*meU*meC*meC | 14 | 77.95 | 93.40 |
| | | | | | | *meC | | | |
| | | RD-13025 | Pyrimidines rich: 12 | L9 | 1373 | meU*meA*meC*meU*meC*meC*meU*meU*meU*meC*meA*meU*meU | 14 | 73.70 | 91.90 |
| | | | | | | *meC | | | |
| L | Balanced | RD-13026 | Balanced | L9 | 1374 | meG*meG*meC*meU*meA*meU*meU*meA*meU*meC*meC*meA*meU | 14 | 79.60 | 91.80 |
| | | | Purineses/ | | | *meA | | | |
| | | | Pyrimidines1 | | | | | | |
| | | RD-13027 | Balanced | L9 | 1375 | meU*meU*meA*meC*meU*meC*meA*meG*meG*meC*meA*meG*meG | 14 | 83.60 | 96.10 |
| | | | Purineses/ | | | *meA | | | |
| | | | Pyrimidines2 | | | | | | |
| | | RD-13028 | Balanced | L9 | 1376 | meA*meU*meG*meU*meG*meC*meA*meA*meC*meC*meA*meU*MeC | 14 | 82.65 | 92.95 |
| | | | Purineses/ | | | *meG | | | |
| | | | Pyrimidines3 | | | | | | |
| | | RD-13029 | Balanced | L9 | 1377 | meC*meC*meG*meG*meU*meG*meU*meA*meU*meG*meU*meC*meA | 14 | 82.05 | 94.60 |
| | | | Purineses/ | | | *meA | | | |
| | | | Pyrimidines4 | | | | | | |
| | | RD-13030 | Balanced | L9 | 1378 | meU*meU*meU*meG*meU*meC*meG*meG*meU*meA*meC*meC*meA | 14 | 80.20 | 94.65 |
| | | | Purineses/ | | | *meA | | | |
| | | | Pyrimidines5 | | | | | | |
| | | RD-13031 | Balanced | L9 | 1379 | meC*meU*meC*meU*meA*meA*meG*meG*meC*meA*meC*meC*meU | 14 | 77.35 | 97.75 |
| | | | Purineses/ | | | *meG | | | |
| | | | Pyrimidines6 | | | | | | |

spacer-9 linker; C3, spacer-C3 linker; C6, spacer-C6 linker; C12, spacer-C12 linker; UUACA, L7 linker; UUCUU, L8 linker; d
spacer, L12 linker; L14, spacer-L14 linker; L15, spacer-L15 linker; L16, spacer-L16 linker.

TABLE 28
Oligonucleotide sequences and duplex compositions of novel ODV designs

| ODV- | | SEQ | | |
|---|---|---|---|---|
| SIRNA | Target | ID | | Size |
| name | gene | NO | Sequence (5′-3′) | (bp) |
| RD-12556 | SOD1 | 1196 | mA*fG*mGfUmGfGmAfAfAfUfGfAmAfGmAfAmAfG*mU*fA | 20 |
| | | 57 | VPmU*fA*mCfUmUfUmCfUmUfCmAfUmUfUmCfCmAfCmCfU*mU*fU | 22 |
| RD-12559 | SOD1 | 1197 | mA*fG*mGfUmGfGmAfAfAfUfGfAmAfGmAfAmAfG*mU*fA-S9- | 34 |
| | | | meU*meU*meG*meU*meA*meU*meU*meC*meU*meA*meU*meG*meU*meU | |
| | | 57 | VPmU*fA*mCfUmUfUmCfUmUfCmAfUmUfUmCfCmAfCmCfU*mU*fU | 22 |
| RD-12941 | SOD1 | 1198 | mA*fG*mGfUmGfGmAfAfAfUfGfAmAfGmAfAmAfG*mU*fA-S18- | 34 |
| | | | meU*meU*meG*meU*meA*meU*meU*meC*meU*meA*meU*meG*meU*meU | |
| | | 57 | VPmU*fA*mCfUmUfUmCfUmUfCmAfUmUfUmCfCmAfCmCfU*mU*fU | 22 |
| RD-12942 | SOD1 | 1199 | mA*fG*mGfUmGfGmAfAfAfUfGfAmAfGmAfAmAfG*mU*fA-C6- | 34 |
| | | | meU*meU*meG*meU*meA*meU*meU*meC*meU*meA*meU*meG*meU*meU | |
| | | 57 | VPmU*fA*mCfUmUfUmCfUmUfCmAfUmUfUmCfCmAfCmCfU*mU*fU | 22 |
| RD-12943 | SOD1 | 1200 | mA*fG*mGfUmGfGmAfAfAfUfGfAmAfGmAfAmAfG*mU*fA-(UUACA)- | 39 |
| | | | meU*meU*meG*meU*meA*meU*meU*meC*meU*meA*meU*meG*meU*meU | |
| | | 57 | VPmU*fA*mCfUmUfUmCfUmUfCmAfUmUfUmCfCmAfCmCfU*mU*fU | 22 |
| RD-12944 | SOD1 | 1201 | mA*fG*mGfUmGfGmAfAfAfUfGfAmAfGmAfAmAfG*mU*[A-(UUCUU)- | 39 |
| | | | meU*meU*meG*meU*meA*meU*meU*meC*meU*meA*meU*meG*meU*meU | |
| | | 57 | VPmU*fA*mCfUmUfUmCfUmUfCmAfUmUfUmCfCmAfCmCfU*mU*fU | 22 |
| RD-12945 | SOD1 | 1202 | mA*fG*mGfUmGfGmAfAfAfUfGfAmAfGmAfAmAfG*mU*fA-C3- | 34 |
| | | | meU*meU*meG*meU*meA*meU*meU*meC*meU*meA*meU*meG*meU*meU | |
| | | 57 | VPmU*fA*mCfUmUfUmCfUmUfCmAfUmUfUmCfCmAfCmCfU*mU*fU | 22 |
| RD-12947 | SOD1 | 1204 | mA*fG*mGfUmGfGmAfAfAfUfGfAmAfGmAfAmAfG*mU*fA-d spacer- | 34 |
| | | | meU*meU*meG*meU*meA*meU*meU*meC*meU*meA*meU*meG*meU*meU | |
| | | 57 | VPmU*fA*mCfUmUfUmCfUmUfCmAfUmUfUmCfCmAfCmCfU*mU*fU | 22 |
| RD-12948 | SOD1 | 1205 | mA*fG*mGfUmGfGmAfAfAfUfGfAmAfGmAfAmAfG*mU*fA-C12- | 34 |
| | | | meU*meU*meG*meU*meA*meU*meU*meC*meU*meA*meU*meG*meU*meU | |
| | | 57 | VPmU*fA*mCfUmUfUmCfUmUfCmAfUmUfUmCfCmAfCmCfU*mU*fU | 22 |
| RD-12949 | SOD1 | 1206 | mA*fG*mGfUmGfGmAfAfAfUfGfAmAfGmAfAmAfG*mU*fA-L14- | 34 |
| | | | meU*meU*meG*meU*meA*meU*meU*meC*meU*meA*meU*meG*meU*meU | |
| | | 57 | VPmU*fA*mCfUmUfUmCfUmUfCmAfUmUfUmCfCmAfCmCfU*mU*fU | 22 |
| RD-12950 | SOD1 | 1207 | mA*fG*mGfUmGfGmAfAfAfUfGfAmAfGmAfAmAfG*mU*fA-L15- | 34 |
| | | | meU*meU*meG*meU*meA*meU*meU*meC*meU*meA*meU*meG*meU*meU | |
| | | 57 | VPmU*fA*mCfUmUfUmCfUmUfCmAfUmUfUmCfCmAfCmCfU*mU*fU | 22 |
| RD-12951 | SOD1 | 1208 | mA*fG*mGfUmGfGmAfAfAfUfGfAmAfGmAfAmAfG*mU*fA-L16- | 34 |
| | | | meU*meU*meG*meU*meA*meU*meU*meC*meU*meA*meU*meG*meU*meU | |
| | | 57 | VPmU*fA*mCfUmUfUmCfUmUfCmAfUmUfUmCfCmAfCmCfU*mU*fU | 22 |
| RD-12952 | SOD1 | 1209 | mA*fG*mGfUmGfGmAfAfAfUfGfAmAfGmAfAmAfG*mU*fA-L9- | 34 |
| | | | meU*meU*meG*meU*meA*meU*meU*meC*meU*meU*meG*meU*meA*meU | |
| | | 57 | VPmU*fA*mCfUmUfUmCfUmUfCmAfUmUfUmCfCmAfCmCfU*mU*fU | 22 |
| RD-12953 | SOD1 | 1210 | mA*fG*mGfUmGfGmAfAfAfUfGfAmAfGmAfAmAfG*mU*fA-L9- | 34 |
| | | | meU*meA*meU*meG*meU*meU*meU*meC*meU*meA*meU*meG*meU*meU | |
| | | 57 | VPmU*fA*mCfUmUfUmCfUmUfCmAfUmUfUmCfCmAfCmCfU*mU*fU | 22 |
| RD-12954 | SOD1 | 1211 | mA*fG*mGfUmGfGmAfAfAfUfGfAmAfGmAfAmAfG*mU*fA-L9- | 34 |
| | | | meU*meU*meG*meU*meA*meU*meC*meU*meU*meA*meU*meG*meU*meU | |
| | | 57 | VPmU*fA*mCfUmUfUmCfUmUfCmAfUmUfUmCfCmAfCmCfU*mU*fU | 22 |
| RD-12955 | SOD1 | 1212 | mA*fG*mGfUmGfGmAfAfAfUfGfAmAfGmAfAmAfG*mU*fA-L9- | 32 |
| | | | meU*meU*meG*meU*meA*meU*meU*meA*meU*meG*meU*meU | |
| | | 57 | VPmU*fA*mCfUmUfUmCfUmUfCmAfUmUfUmCfCmAfCmCfU*mU*fU | 22 |
| RD-12956 | SOD1 | 1213 | mA*fG*mGfUmGfGmAfAfAfUfGfAmAfGmAfAmAfG*mU*fA-L9- | 34 |
| | | | meU*meU*meG*meU*meA*meU*meC*meC*meU*meA*meU*meG*meU*meU | |
| | | 57 | VPmU*fA*mCfUmUfUmCfUmUfCmAfUmUfUmCfCmAfCmCfU*mU*fU | 22 |
| RD-12957 | SOD1 | 1214 | mA*fG*mGfUmGfGmAfAfAfUfGfAmAfGmAfAmAfG*mU*fA-L9- | 26 |
| | | | meU*meU*meG*meU*meA*meU | |
| | | 57 | VPmU*fA*mCfUmUfUmCfUmUfCmAfUmUfUmCfCmAfCmCfU*mU*fU | 22 |
| RD-12958 | SOD1 | 1215 | mA*fG*mGfUmGfGmAfAfAfUfGfAmAfGmAfAmAfG*mU*fA-L9- | 28 |
| | | | meU*meU*meG*meU*meA*meU*meU*meC | |
| | | 57 | VPmU*fA*mCfUmUfUmCfUmUfCmAfUmUfUmCfCmAfCmCfU*mU*fU | 22 |
| RD-12959 | SOD1 | 1216 | mA*fG*mGfUmGfGmAfAfAfUfGfAmAfGmAfAmAfG*mU*fA-L9- | 31 |
| | | | meU*meU*meG*meU*meA*meU*meU*meC*meU*meA*meU | |
| | | 57 | VPmU*fA*mCfUmUfUmCfUmUfCmAfUmUfUmCfCmAfCmCfU*mU*fU | 22 |
| RD-12960 | SOD1 | 1217 | mA*fG*mGfUmGfGmAfAfAfUfGfAmAfGmAfAmAfG*mU*fA-L9- | 34 |
| | | | meU*meU*meG*meU*meA*meU*meA*meG*meU*meA*meU*meG*meL*meU | |
| | | 57 | VPmU*fA*mCfUmUfUmCfUmUfCmAfUmUfUmCfCmAfCmCfU*mU*fU | 22 |
| RD-12961 | SOD1 | 1218 | mA*fG*mGfUmGfGmAfAfAfUfGfAmAfGmAfAmAfG*mU*fA-L9- | 34 |
| | | | meU*meA*meG*meU*meA*meU*meU*meC*meU*meA*meU*meG*meA*meU | |
| | | 57 | VPmU*fA*mCfUmUfUmCfUmUfCmAfUmUfUmCfCmAfCmCfU*mU*fU | 22 |
| RD-12962 | SOD1 | 1219 | mA*fG*mGfUmGfGmAfAfAfUfGfAmAfGmAfAmAfG*mU*fA-L9- | 34 |
| | | | meU*meA*meC*meU*meA*meU*meU*meC*meU*meA*meU*meC*meA*meU | |
| | | 57 | VPmU*fA*mCfUmUfUmCfUmUfCmAfUmUfUmCfCmAfCmCfU*mU*fU | 22 |
| RD-12963 | SOD1 | 1220 | mA*fG*mGfUmGfGmAfAfAfUfGfAmAfGmAfAmAfG*mU*fA-L9- | 34 |
| | | | meU*meA*meC*meA*meU*meA*meU*meC*meA*meU*meA*meC*meA*meU | |
| | | 57 | VPmU*fA*mCfUmUfUmCfUmUfCmAfUmUfUmCfCmAfCmCfU*mU*fU | 22 |
| RD-12964 | SOD1 | 1221 | mA*fG*mGfUmGfGmAfAfAfUfGfAmAfGmAfAmAfG*mU*fA-L9- | 34 |
| | | | meU*meU*meA*meU*meA*meU*meU*meC*meU*meA*meU*meA*meU*meU | |
| | | 57 | VPmU*fA*mCfUmUfUmCfUmUfCmAfUmUfUmCfCmAfCmCfU*mU*fU | 22 |
| RD-12965 | SOD1 | 1222 | mA*fG*mGfUmGfGmAfAfAfUfGfAmAfGmAfAmAfG*mU*fA-L9- | 34 |
| | | | meU*meU*meA*meU*meA*meU*meU*meC*meU*meA*meU*meG*meU*meU | 22 |
| | | 57 | VPmU*fA*mCfUmUfUmCfUmUfCmAfUmUfUmCfCmAfCmCfU*mU*fU | |
| RD-12966 | SOD1 | 1223 | mA*fG*mGfUmGfGmAfAfAfUfGfAmAfGmAfAmAfG*mU*fA-L9- | 34 |
| | | | meU*meA*meG*meU*meA*meU*meU*meC*meU*meA*meU*meG*meU*meU | |
| | | 57 | VPmU*fA*mCfUmUfUmCfUmUfCmAfUmUfUmCfCmAfCmCfU*mU*fU | 22 |
| RD-12967 | SOD1 | 1224 | mA*fG*mGfUmGfGmAfAfAfUfGfAmAfGmAfAmAfG*mU*fA-L9- | 34 |
| | | | meU*meUmeGmeUmeAmeUmeUmeCmeUmeAmeUmeGmeU*meU | |
| | | 57 | VPmU*fA*mCfUmUfUmCfUmUfCmAfUmUfUmCfCmAfCmCfU*mU*fU | 22 |
| RD-12968 | SOD1 | 1225 | mA*fG*mGfUmGfGmAfAfAfUfGfAmAfGmAfAmAfG*mU*fA-L9- | 34 |
| | | | meU*meU*meGmeUmeAmeUmeUmeCmeUmeAmeUmeG*meU*meU | |
| | | 57 | VPmU*fA*mCfUmUfUmCfUmUfCmAfUmUfUmCfCmAfCmCfU*mU*fU | 22 |
| RD-12969 | SOD1 | 1226 | mA*fG*mGfUmGfGmAfAfAfUfGfAmAfGmAfAmAfG*mU*fA-L9- | 34 |
| | | | meU*meU*meG*meUmeAmeUmeUmeCmeUmeU*meG*meU*meU | |
| | | 57 | VPmU*fA*mCfUmUfUmCfUmUfCmAfUmUfUmCfCmAfCmCfU*mU*fU | 22 |
| RD-12970 | SOD1 | 1227 | mA*fG*mGfUmGfGmAfAfAfUfGfAmAfGmAfAmAfG*mU*fA-L9- | 34 |
| | | | meU*meU*meG*meU*meAmeUmeUmeCmeUmeA*meU*meG*meU*meU | |
| | | 57 | VPmU*fA*mCfUmUfUmCfUmUfCmAfUmUfUmCfCmAfCmCfU*mU*fU | 22 |
| RD-12971 | SOD1 | 1228 | mA*fG*mGfUmGfGmAfAfAfUfGfAmAfGmAfAmAfG*mU*fA-L9- | 34 |
| | | | meU*meU*meG*meU*meA*meUmeUmeCmeU*meA*meU*meG*meU*meU | |
| | | 57 | VPmU*fA*mCfUmUfUmCfUmUfCmAfUmUfUmCfCmAfCmCfU*mU*fU | 22 |
| RD-12972 | SOD1 | 1229 | mA*fG*mGfUmGfGmAfAfAfUfGfAmAfGmAfAmAfG*mU*fA-L9- | 34 |
| | | | meU*meU*meG*meU*meA*meU*meUmeC*meU*meA*meU*meG*meU*meU | |
| | | 57 | VPmU*fA*mCfUmUfUmCfUmUfCmAfUmUfUmCfCmAfCmCfU*mU*fU | 22 |
| RD-12973 | SOD1 | 1230 | mA*fG*mGfUmGfGmAfAfAfUfGfAmAfGmAfAmAfG*mU*fA-L9- | 34 |
| | | | meU*meU*meG*meU*meA*meU*mU*mC*meU*meA*meU*meG*meU*meU | |
| | | 57 | VPmU*fA*mCfUmUfUmCfUmUfCmAfUmUfUmCfCmAfCmCfU*mU*fU | 22 |
| RD-12974 | SOD1 | 1231 | mA*fG*mGfUmGfGmAfAfAfUfGfAmAfGmAfAmAfG*mU*fA-L9- | 34 |
| | | | meU*meU*meG*meU*meA*mU*mU*mC*mU*meA*meU*meG*meU*meU | |
| | | 57 | VPmU*fA*mCfUmUfUmCfUmUfCmAfUmUfUmCfCmAfCmCfU*mU*fU | 22 |
| RD-12975 | SOD1 | 1232 | mA*fG*mGfUmGfGmAfAfAfUfGfAmAfGmAfAmAfG*mU*fA-L9- | 34 |
| | | | meU*meU*meG*meU*mA*mU*mU*mC*mU*mA*meU*meG*meU*meU | |
| | | 57 | VPmU*fA*mCfUmUfUmCfUmUfCmAfUmUfUmCfCmAfCmCfU*mU*fU | 22 |
| RD-12976 | SOD1 | 1233 | mA*fG*mGfUmGfGmAfAfAfUfGfAmAfGmAfAmAfG*mU*fA-L9- | 34 |
| | | | meU*meU*meG*mU*mA*mU*mU*mC*mU*mA*mU*meG*meU*meU | |
| | | 57 | VPmU*fA*mCfUmUfUmCfUmUfCmAfUmUfUmCfCmAfCmCfU*mU*fU | 22 |
| RD-12977 | SOD1 | 1234 | mA*fG*mGfUmGfGmAfAfAfUfGfAmAfGmAfAmAfG*mU*fA-L9- | 34 |
| | | | meU*meU*mG*mU*mA*mU*mU*mC*mU*mA*mU*mG*meU*meU | |
| | | 57 | VPmU*fA*mCfUmUfUmCfUmUfCmAfUmUfUmCfCmAfCmCfU*mU*fU | 22 |
| RD-12978 | SOD1 | 1235 | mA*fG*mGfUmGfGmAfAfAfUfGfAmAfGmAfAmAfG*mU*fA-L9- | 34 |
| | | | meU*mU*mG*mU*mA*mU*mU*mC*mU*mA*mU*mG*mU*meU | |
| | | 57 | VPmU*fA*mCfUmUfUmCfUmUfCmAfUmUfUmCfCmAfCmCfU*mU*fU | 22 |
| RD-12979 | SOD1 | 1236 | mA*fG*mGfUmGfGmAfAfAfUfGfAmAfGmAfAmAfG*mU*fA-L9- | 34 |
| | | | mU*mU*mG*mU*mA*mU*mU*mC*mU*mA*mU*mG*mU*mU | |
| | | 57 | VPmU*fA*mCfUmUfUmCfUmUfCmAfUmUfUmCfCmAfCmCfU*mU*fU | 22 |
| RD-12980 | SOD1 | 1237 | mA*fG*mGfUmGfGmAfAfAfUfGfAmAfGmAfAmAfG*mU*fA-L9- | 34 |
| | | | meU*meU*meG*meU*meA*meU*meU*meC*meU*meA*meU*meG*meU | |
| | | 57 | VPmU*fA*mCfUmUfUmCfUmUfCmAfUmUfUmCfCmAfCmCfU*mU*fU | 22 |
| RD-12981 | SOD1 | 1238 | mA*fG*mGfUmGfGmAfAfAfUfGfAmAfGmAfAmAfG*mU*fA-L9- | 32 |
| | | | meU*meU*meG*meU*meA*meU*meU*meC*meU*meA*meU*meG | |
| | | 57 | VPmU*fA*mCfUmUfUmCfUmUfCmAfUmUfUmCfCmAfCmCfU*mU*fU | 22 |
| RD-12982 | SOD1 | 1239 | mA*fG*mGfUmGfGmAfAfAfUfGfAmAfGmAfAmAfG*mU*fA-L9- | 31 |
| | | | meU*meU*meG*meU*meA*meU*meU*meC*meU*meA*meU | |
| | | 57 | VPmU*fA*mCfUmUfUmCfUmUfCmAfUmUfUmCfCmAfCmCfU*mU*fU | 22 |
| RD-12983 | SOD1 | 1240 | mA*fG*mGfUmGfGmAfAfAfUfGfAmAfGmAfAmAfG*mU*fA-L9- | 30 |
| | | | meU*meU*meG*meU*meA*meU*meU*meC*meU*meA | |
| | | 57 | VPmU*fA*mCfUmUfUmCfUmUfCmAfUmUfUmCfCmAfCmCIU*mU*fU | 22 |
| RD-12984 | SOD1 | 1241 | mA*fG*mGfUmGfGmAfAfAfUfGfAmAfGmAfAmAfG*mU*fA-L9- | 29 |
| | | | meU*meU*meG*meU*meA*meU*meU*meC*meU | |
| | | 57 | VPmU*fA*mCfUmUfUmCfUmUfCmAfUmUfUmCfCmAfCmCfU*mU*fU | 22 |
| RD-12985 | SOD1 | 1242 | mA*fG*mGfUmGfGmAfAfAfUfGfAmAfGmAfAmAfG*mU*fA-L9- | 28 |
| | | | meU*meU*meG*meU*meA*meU*meU*meC | |
| | | 57 | VPmU*fA*mCfUmUfUmCfUmUfCmAfUmUfUmCfCmAfCmCfU*mU*fU | 22 |
| RD-12986 | SOD1 | 1243 | mA*fG*mGfUmGfGmAfAfAfUfGfAmAfGmAfAmAfG*mU*fA-L9- | 27 |
| | | | meU*meU*meG*meU*meA*meU*meU | |
| | | 57 | VPmU*fA*mCfUmUfUmCfUmUfCmAfUmUfUmCfCmAfCmCfU*mU*fU | 22 |
| RD-12987 | SOD1 | 1244 | mA*fG*mGfUmGfGmAfAfAfUfGfAmAfGmAfAmAfG*mU*fA-L9- | 26 |
| | | | meU*meU*meG*meU*meA*meU | |
| | | 57 | VPmU*fA*mCfUmUfUmCfUmUfCmAfUmUfUmCfCmAfCmCfU*mU*fU | 22 |
| RD-12988 | SOD1 | 1245 | mA*fG*mGfUmGfGmAfAfAfUfGfAmAfGmAfAmAfG*mU*fA-L9- | 34 |
| | | | meC*meG*meG*meA*meA*meG*meU*meA*meC*meC*meC*meA*meA*meC | |
| | | 57 | VPmU*fA*mCfUmUfUmCfUmUfCmAfUmUfUmCfCmAfCmCfU*mU*fU | 22 |
| RD-12989 | SOD1 | 1246 | mA*fG*mGfUmGfGmAfAfAfUfGfAmAfGmAfAmAfG*mU*fA-L9- | 34 |
| | | | meA*meA*meU*meA*meA*meC*meU*meA*meC*meG*meU*meG*meU*meA | |
| | | 57 | VPmU*fA*mCfUmUfUmCfUmUfCmAfUmUfUmCfCmAfCmCfU*mU*fU | 22 |
| RD-12990 | SOD1 | 1247 | mA*fG*mGfUmGfGmAfAfAfUfGfAmAfGmAfAmAfG*mU*fA-L9- | 34 |
| | | | meA*meA*meU*meA*meC*meG*meA*meA*meA*meC*meC*meU*meG*meA | |
| | | 57 | VPmU*fA*mCfUmUfUmCfUmUfCmAfUmUfUmCfCmAfCmCfU*mU*fU | 22 |
| RD-12991 | SOD1 | 1248 | mA*fG*mGfUmGfGmAfAfAfUfGfAmAfGmAfAmAfG*mU*fA-L9- | 34 |
| | | | meA*meC*meG*meA*meC*meA*meU*meC*meA*meA*meA*meU*meA*meA | |
| | | 57 | VPmU*fA*mCfUmUfUmCfUmUfCmAfUmUfUmCfCmAfCmCfU*mU*fU | 22 |
| RD-12992 | SOD1 | 1249 | mA*fG*mGfUmGfGmAfAfAfUfGfAmAfGmAfAmAfG*mU*fA-L9- | 34 |
| | | | meA*meA*meA*meU*meA*meA*meU*meA*meA*meG*meA*meA*meC*meG | |
| | | 57 | VPmU*fA*mCfUmUfUmCfUmUfCmAfUmUfUmCfCmAfCmCfU*mU*fU | 22 |
| RD-12993 | SOD1 | 1250 | mA*fG*mGfUmGfGmAfAfAfUfGfAmAfGmAfAmAfG*mU*fA-L9- | 34 |
| | | | meC*meC*meA*meA*meC*meC*meA*meU*meC*meG*meG*meA*meU*meU | |
| | | 57 | VPmU*fA*mCfUmUfUmCfUmUfCmAfUmUfUmCfCmAfCmCfU*mU*fU | 22 |
| RD-12994 | SOD1 | 1251 | mA*fG*mGfUmGfGmAfAfAfUfGfAmAfGmAfAmAfG*mU*fA-L9- | 34 |
| | | | meC*meG*meU*meC*meC*meC*meU*meC*meG*meG*meG*meG*meA*meC | |
| | | 57 | VPmU*fA*mCfUmUfUmCfUmUfCmAfUmUfUmCfCmAfCmCfU*mU*fU | 22 |
| RD-12995 | SOD1 | 1252 | mA*fG*mGfUmGfGmAfAfAfUfGfAmAfGmAfAmAfG*mU*fA-L9- | 34 |
| | | | meC*meC*meA*meA*meA*meC*meC*meG*meC*meA*meG*meC*meU*meC | |
| | | 57 | VPmU*fA*mCfUmUfUmCfUmUfCmAfUmUfUmCfCmAfCmCfU*mU*fU | 22 |
| RD-12996 | SOD1 | 1253 | mA*fG*mGfUmGfGmAfAfAfUfGfAmAfGmAfAmAfG*mU*fA-L9- | 34 |
| | | | meC*meG*meC*meC*meA*meC*meC*meC*meU*meC*meU*meG*meG*meC | |
| | | 57 | VPmU*fA*mCfUmUfUmCfUmUfCmAfUmUfUmCfCmAfCmCfU*mU*fU | 22 |
| RD-12997 | SOD1 | 1254 | mA*fG*mGfUmGfGmAfAfAfUfGfAmAfGmAfAmAfG*mU*fA-L9- | 34 |
| | | | meC*meA*meC*meC*meC*meC*meC*meC*meA*meC*meA*meU*meC*meG | |
| | | 57 | VPmU*fA*mCfUmUfUmCfUmUfCmAfUmUfUmCfCmAfCmCfU*mU*fU | 22 |
| RD-12998 | SOD1 | 1255 | mA*fG*mGfUmGfGmAfAfAfUfGfAmAfGmAfAmAfG*mU*fA-L9- | 34 |
| | | | meC*meC*meG*meC*meU*meC*meC*meC*meC*meC*meC*meU*meA*meC | |
| | | 57 | VPmU*fA*mCfUmUfUmCfUmUfCmAfUmUfUmCfCmAfCmCfU*mU*fU | 22 |
| RD-12999 | SOD1 | 1256 | mA*fG*mGfUmGfGmAfAfAfUfGfAmAfGmAfAmAfG*mU*fA-L9- | 34 |
| | | | meG*meG*meC*meA*meC*meA*meA*meG*meG*meA*meU*meU*meC*meG | |
| | | 57 | VPmU*fA*mCfUmUfUmCfUmUfCmAfUmUfUmCfCmAfCmCfU*mU*fU | 22 |
| RD-13000 | SOD1 | 1257 | mA*fG*mGfUmGfGmAfAfAfUfGfAmAfGmAfAmAfG*mU*fA-L9- | 34 |
| | | | meG*meG*meU*meG*meU*meG*meG*meA*meA*meG*meC*meC*meU*meA | |
| | | 57 | VPmU*fA*mCfUmUfUmCfUmUfCmAfUmUfUmCfCmAfCmCfU*mU*fU | 22 |
| RD-13001 | SOD1 | 1258 | mA*fG*mGfUmGfGmAfAfAfUfGfAmAfGmAfAmAfG*mU*fA-L9- | 34 |
| | | | meG*meA*meG*meU*meU*meC*meG*meG*meA*meU*meG*meG*meG*meC | |
| | | 57 | VPmU*fA*mCfUmUfUmCfUmUfCmAfUmUfUmCfCmAfCmCfU*mU*fU | 22 |
| RD-13002 | SOD1 | 1259 | mA*fG*mGfUmGfGmAfAfAfUfGfAmAfGmAfAmAfG*mU*fA-L9- | 34 |
| | | | meG*meA*meG*meC*meG*meG*meG*meG*meU*meG*meC*meG*meC*meC | |
| | | 57 | VPmU*fA*mCfUmUfUmCfUmUfCmAfUmUfUmCfCmAfCmCfU*mU*fU | 22 |
| RD-13003 | SOD1 | 1260 | mA*fG*mGfUmGfGmAfAfAfUfGfAmAfGmAfAmAfG*mU*fA-L9- | 34 |
| | | | meG*meG*meU*meG*meG*meG*meC*meG*meU*meC*meG*meG*meU*meG | |
| | | 57 | VPmU*fA*mCfUmUfUmCfUmUfCmAfUmUfUmCfCmAfCmCfU*mU*fU | 22 |
| RD-13004 | SOD1 | 1261 | mA*fG*mGfUmGfGmAfAfAfUfGfAmAfGmAfAmAfG*mU*fA-L9- | 34 |
| | | | meU*meG*meG*meG*meU*meA*meG*meG*meU*meC*meU*meC*meG*meU | |
| | | 57 | VPmU*fA*mCfUmUfUmCfUmUfCmAfUmUfUmCfCmAfCmCfU*mU*fU | 22 |
| RD-13005 | SOD1 | 1262 | mA*fG*mGfUmGfGmAfAfAfUfGfAmAfGmAfAmAfG*mU*fA-L9- | 34 |
| | | | meU*meU*meG*meU*meC*meC*meG*meU*meU*meC*meG*meC*meU*meA | |
| | | 57 | VPmU*fA*mCfUmUfUmCfUmUfCmAfUmUfUmCfCmAfCmCfU*mU*fU | 22 |
| RD-13006 | SOD1 | 1263 | mA*fG*mGfUmGfGmAfAfAfUfGfAmAfGmAfAmAfG*mU*fA-L9- | 34 |
| | | | meU*meA*meU*meG*meU*meC*meG*meU*meA*meU*meU*meG*meU*meA | |
| | | 57 | VPmU*fA*mCfUmUfUmCfUmUfCmAfUmUfUmCfCmAfCmCfU*mU*fU | 22 |
| RD-13007 | SOD1 | 1264 | mA*fG*mGfUmGfGmAfAfAfUfGfAmAfGmAfAmAfG*mU*fA-L9- | 34 |
| | | | meU*meA*meU*meU*meG*meC*meU*meC*meG*meC*meU*meU*meU*meU | |
| | | 57 | VPmU*A*mCfUmUfUmCfUmUfCmAfUmUfUmCfCmAfCmCfU*mU*fU | 22 |
| RD-13008 | SOD1 | 1265 | mA*fG*mGfUmGfGmAfAfAfUfGfAmAfGmAfAmAfG*mU*fA-L9- | 34 |
| | | | meU*meU*meU*meC*meG*meU*meU*meU*meG*meC*meU*meG*meU*meU | |
| | | 57 | VPmU*A*mCfUmUfUmCfUmUfCmAfUmUfUmCfCmAfCmCfU*mU*fU | 22 |
| RD-13009 | SOD1 | 1266 | mA*fG*mGfUmGfGmAfAfAfUfGfAmAfGmAfAmAfG*mU*fA-L9- | 34 |
| | | | meU*meG*meU*meU*meA*meC*meG*meU*meU*meU*meU*meU*meU*meU | |
| | | 57 | VPmU*fA*mCfUmUfUmCfUmUfCmAfUmUfUmCfCmAfCmCfU*mU*fU | 22 |
| RD-13010 | SOD1 | 1267 | mA*fG*mGfUmGfGmAfAfAfUfGfAmAfGmAfAmAfG*mU*fA-L9- | 34 |
| | | | meG*meG*meG*meU*meU*meA*meA*meA*meA*meC*meC*meC*meG*meG | |
| | | 57 | VPmU*fA*mCfUmUfUmCfUmUfCmAfUmUfUmCfCmAfCmCfU*mU*fU | 22 |
| RD-13011 | SOD1 | 1268 | mA*fG*mGfUmGfGmAfAfAfUfGfAmAfGmAfAmAfG*mU*fA-L9- | 34 |
| | | | meA*meA*meC*meG*meA*meA*meC*meC*meG*meA*meG*meU*meG*meU | |
| | | 57 | VPmU*fA*mCfUmUfUmCfUmUfCmAfUmUfUmCfCmAfCmCfU*mU*fU | 22 |
| RD-13012 | SOD1 | 1269 | mA*fG*mGfUmGfGmAfAfAfUfGfAmAfGmAfAmAfG*mU*fA-L9- | 34 |
| | | | meU*meG*meC*meA*meU*meC*meG*meG*meA*meU*meG*meA*meA*meA | |
| | | 57 | VPmU*fA*mCfUmUfUmCfUmUfCmAfUmUfUmCfCmAfCmCU*mU*fU | 22 |
| RD-13013 | SOD1 | 1270 | mA*fG*mGfUmGfGmAfAfAfUfGfAmAfGmAfAmAfG*mU*fA-L9- | 34 |
| | | | meA*meC*meG*meG*meA*meA*meG*meA*meG*meG*meC*meG*meC*meC | |
| | | 57 | VPmU*fA*mCfUmUfUmCfUmUfCmAfUmUfUmCfCmAfCmCfU*mU*fU | 22 |
| RD-13014 | SOD1 | 1271 | mA*fG*mGfUmGfGmAfAfAfUfGfAmAfGmAfAmAfG*mU*fA-L9- | 34 |
| | | | meG*meU*meA*meA*meG*meU*meA*meC*meG*meC*meA*meG*meG*meG | |
| | | 57 | VPmU*fA*mCfUmUfUmCfUmUfCmAfUmUfUmCfCmAfCmCfU*mU*fU | 22 |
| RD-13015 | SOD1 | 1272 | mA*fG*mGfUmGfGmAfAfAfUfGfAmAfGmAfAmAfG*mU*fA-L9- | 34 |
| | | | meG*meU*meA*meA*meA*meG*meU*meG*meA*meG*meC*meA*meU*meA | |
| | | 57 | VPmU*fA*mCfUmUfUmCfUmUfCmAfUmUfUmCfCmAfCmCfU*mU*fU | 22 |
| RD-13016 | SOD1 | 1273 | mA*fG*mGfUmGfGmAfAfAfUfGfAmAfGmAfAmAfG*mU*fA-L9- | 34 |
| | | | meA*meA*meU*meA*meG*meA*meG*meC*meG*meA*meG*meG*meA*meU | |
| | | 57 | VPmU*fA*mCfUmUfUmCfUmUfCmAfUmUfUmCfCmAfCmCfU*mU*fU | 22 |
| RD-13017 | SOD1 | 1274 | mA*fG*mGfUmGfGmAfAfAfUfGfAmAfGmAfAmAfG*mU*fA-L9- | 34 |
| | | | meC*meG*meC*meA*meG*meA*meG*meA*meA*meU*meG*meA*meA*meA | |
| | | 57 | VPmU*fA*mCfUmUfUmCfUmUfCmAfUmUfUmCfCmAfCmCfU*mU*fU | 22 |
| RD-13018 | SOD1 | 1275 | mA*fG*mGfUmGfGmAfAfAfUfGfAmAfGmAfAmAfG*mU*fA-L9- | 34 |
| | | | meU*meG*meC*meG*meU*meC*meG*meA*meA*meU*meU*meC*meU*meC | |
| | | 57 | VPmU*fA*mCfUmUfUmCfUmUfCmAfUmUfUmCfCmAfCmCfU*mU*fU | 22 |
| RD-13019 | SOD1 | 1276 | mA*G*mGfUmGfGmAfAfAfUfGfAmAfGmAfAmAfG*mU*fA-L9- | 34 |
| | | | meU*meC*meA*meC*meU*meU*meA*meU*meG*meC*meA*meC*meG*meC | |
| | | 57 | VPmU*fA*mCfUmUfUmCfUmUfCmAfUmUfUmCfCmAfCmCfU*mU*fU | 22 |
| RD-13020 | SOD1 | 1277 | mA*fG*mGfUmGfGmAfAfAfUfGfAmAfGmAfAmAfG*mU*fA-L9- | 34 |
| | | | meU*meC*meU*meU*meA*meU*meU*meA*meC*meA*meG*meA*meU*meC | |
| | | 57 | VPmU*fA*mCfUmUfUmCfUmUfCmAfUmUfUmCfCmAfCmCfU*mU*fU | 22 |
| RD-13021 | SOD1 | 1278 | mA*fG*mGfUmGfGmAfAfAfUfGfAmAfGmAfAmAfG*mU*fA-L9- | 34 |
| | | | meU*meU*meC*meC*meC*meC*meU*meU*meG*meA*meU*meA*meA*meC | |
| | | 57 | VPmU*fA*mCfUmUfUmCfUmUfCmAfUmUfUmCfCmAfCmCfU*mU*fU | 22 |
| RD-13022 | SOD1 | 1279 | mA*fG*mGfUmGfGmAfAfAfUfGfAmAfGmAfAmAfG*mU*fA-L9- | 34 |
| | | | meC*meC*meU*meU*meU*meU*meC*meU*meA*meG*meA*meU*meC*meG | |
| | | 57 | VPmU*fA*mCfUmUfUmCfUmUfCmAfUmUfUmCfCmAfCmCfU*mU*fU | 22 |
| RD-13023 | SOD1 | 1280 | mA*fG*mGfUmGfGmAfAfAfUfGfAmAfGmAfAmAfG*mU*fA-L9- | 34 |
| | | | meU*meC*meC*meU*meG*meU*meC*meC*meA*meU*meC*meC*meU*meA | |
| | | 57 | VPmU*fA*mCfUmUfUmCfUmUfCmAfUmUfUmCfCmAfCmCfU*mU*fU | 22 |
| RD-13024 | SOD1 | 1281 | mA*fG*mGfUmGfGmAfAfAfUfGfAmAfGmAfAmAfG*mU*fA-L9- | 34 |
| | | | meU*meU*meC*meU*meA*meU*meG*meU*meG*meC*meU*meC*meC*meC | |
| | | 57 | VPmU*fA*mCfUmUfUmCfUmUfCmAfUmUfUmCfCmAfCmCfU*mU*fU | 2.2 |
| RD-13025 | SOD1 | 1282 | mA*fG*mGfUmGfGmAfAfAfUfGfAmAfGmAfAmAfG*mU*fA-L9- | 34 |
| | | | meU*meA*meC*meU*meC*meC*meU*meU*meU*meC*meA*meU*meU*meC | |
| | | 57 | VPmU*fA*mCfUmUfUmCfUmUfCmAfUmUfUmCfCmAfCmCfU*mU*fU | 22 |
| RD-13026 | SOD1 | 1283 | mA*fG*mGfUmGfGmAfAfAfUfGfAmAfGmAfAmAfG*mU*fA-L9- | 34 |
| | | | meG*meG*meC*meU*meA*meU*meU*meA*meU*meC*meC*meA*meU*meA | |
| | | 57 | VPmU*fA*mCfUmUfUmCfUmUfCmAfUmUfUmCfCmAfCmCfU*mU*fU | 22 |
| RD-13027 | SOD1 | 1284 | mA*fG*mGfUmGfGmAfAfAfUfGfAmAfGmAfAmAfG*mU*fA-L9- | 34 |
| | | | meU*meU*meA*meC*meU*meC*meA*meG*meG*meC*meA*meG*meG*meA | |
| | | 57 | VPmU*fA*mCfUmUfUmCfUmUfCmAfUmUfUmCfCmAfCmCfU*mU*fU | 22 |
| RD-13028 | SOD1 | 1285 | mA*fG*mGfUmGfGmAfAfAfUfGfAmAfGmAfAmAfG*mU*fA-L9- | 34 |
| | | | meA*meU*meG*meU*meG*meC*meA*meA*meC*meC*meA*meU*meC*meG | |
| | | 57 | VPmU*fA*mCfUmUfUmCfUmUfCmAfUmUfUmCfCmAfCmCU*mU*fU | 22 |
| RD-13029 | SOD1 | 1286 | mA*fG*mGfUmGfGmAfAfAfUfGfAmAfGmAfAmAfG*mU*fA-L9- | 34 |
| | | | meC*meC*meG*meG*meU*meG*meU*meA*meU*meG*meU*meC*meA*meA | |
| | | 57 | VPmU*fA*mCfUmUfUmCfUmUfCmAfUmUfUmCfCmAfCmCfU*mU*fU | 22 |
| RD-13030 | SOD1 | 1287 | mA*fG*mGfUmGfGmAfAfAfUfGfAmAfGmAfAmAfG*mU*fA-L9- | 34 |
| | | | meU*meU*meU*meG*meU*meC*meG*meG*meU*meA*meC*meC*meA*meA | |
| | | 57 | VPmU*fA*mCfUmUfUmCfUmUfCmAfUmUfUmCfCmAfCmCfU*mU*fU | 22 |
| RD-13031 | SOD1 | 1288 | mA*fG*mGfUmGfGmAfAfAfUfGfAmAfGmAfAmAfG*mU*fA-L9- | 34 |
| | | | meC*meU*meC*meU*meA*meA*meG*meG*meC*meA*meC*meC*meU*meG | |
| | | 57 | VPmU*fA*mCfUmUfUmCfUmUfCmAfUmUfUmCfCmAfCmCfU*mU*fU | 22 |

¶n.b.: upper case, RNA; *, phosphorothioate (PS) backbone modification; f, 2′-fluoro; m, 2′-O-methyl (2′-OMe); me, 2′-O-methoxyethyl (2′MOE); VP, 5′-(E)-vinylphosphonate; C, 5′-methyl cytosine; U, 5′-methyl uracil; S18, spacer-18 linker; S9, spacer-9 linker; L9, spacer-9 linker; C3, spacer-C3 linker; C6, spacer-C6 linker; C12, spacer-C12 linker; UUACA, L7 linker; UUCUU, L8 linker; d spacer, L12 linker; L14, spacer-L 14 linker; L15, spacer-L15 linker; L16, spacer-L16 linker.

TABLE 29
Oligonucleotide strand sequences and duplex compositions

| ODV- | | SEQ | | |
|---|---|---|---|---|
| siRNA | Target | ID | | Size |
| name | gene | NO | Sequence (5′-3′) | (bp) |
| RD-12404 | SOD1 | 947 | fU*mA*fCmUfUmUfUmGfUfGfUmAfGmUfAmCfA*mA*fA-S9- | 33 |
| | | | meU*meU*meG*meU*meA*meU*meU*meC*meU*meA*meU*meG*meU*meU | |
| | | 48 | mU*fU*mUfGmUfAmCfUmAfCmAfCmAfAmAfAmGfUmA*fC*mU | 21 |
| RD-12401 | SOD1 | 948 | GGUGGAAAUGAAGAAAGUA | 19 |
| | | 949 | UACUUUCUUCAUUUCCACCUU | 21 |
| RD-12402 | SOD1 | 46 | fG*mG*fUmGfGmAfAmAfUfGfAmAfGmAfAmAf*GmU*fA | 19 |
| | | 47 | mU*fA*mCfUmUfUmCfUmUfCmAfUmUfUmCfCmAfCmC*fU*mU | 21 |
| RD-12403 | SOD1 | 45 | fG*mG*fUmGfGmAfAmAfUfGfAmAfGmAfAmAf*GmU*fA-S9- | 33 |
| | | | meU*meU*meG*meU*meA*meU*meU*meC*meU*meA*meU*meG*meU*meU | |
| | | 47 | mU*A*mCfUmUfUmCfUmUfCmAfUmUfUmCfCmAfCmC*fU*mU | 21 |
| RD-12557 | SOD1 | 45 | fG*mG*fUmGfGmAfAmAfUfGfAmAfGmAfAmAf*GmU*fA-S9- | 33 |
| | | | meU*meU*meG*meU*meA*meU*meU*meC*meU*meA*meU*meG*meU*meU | |
| | | 57 | VPmU*fA*mCfUmUfUmCfUmUfCmAfUmUfUmCfCmAfCmC*U*mU | 22 |
| RD-12556 | SOD1 | 1196 | mA*fG*mGfUmGfGmAfAfAfUfGfAmAfGmAfAmAfG*mU*fA | 20 |
| | | 57 | VPmU*fA*mCfUmUfUmCfUmUfCmAfUmUfUmCfCmAfCmCfU*mU*fU | 22 |
| RD-12559 | SOD1 | 1197 | mA*fG*mGfUmGfGmAfAfAfUfGfAmAfGmAfAmAfG*mU*fA-S9- | 34 |
| | | | meU*meU*meG*meU*meA*meU*meU*meC*meU*meA*meU*meG*meU*meU | |
| | | 57 | VPmU*fA*mCfUmUfUmCfUmUfCmAfUmUfUmCfCmAfCmCfU*mU*fU | 22 |
| RD-12929 | SOD1 | 1197 | mA*fG*mGfUmGfGmAfAfAfUfGfAmAfGmAfAmAfG*mU*fA-S9- | 34 |
| | | | meU*meU*meG*meU*meA*meU*meU*meC*meU*meA*meU*meG*meU*meU | |
| | | 47 | mU*fA*mCfUmUfUmCfUmUfCmAfUmUfUmCfCmAfCmCfU*mU*fU | 21 |

¶n.b.: upper case, RNA; *, phosphorothioate (PS) backbone modification; f, 2′-fluoro; m, 2′-O-methyl (2′-OMe); me, 2′-O-methoxyethyl (2′MOE); VP, 5′-(E)-vinylphosphonate; C, 5′-methyl cytosine; U, 5′-methyl uracil; S9, spacer-9 linker;

TABLE 30
Oligonucleotide strand sequences and duplex compositions

| ODV- | | SEQ | | |
|---|---|---|---|---|
| siRNA | Target | ID | | Size |
| name | gene | NO | Sequence (5′-3′) | (bp) |
| DS17- | SOD1 | 1289 | AGGUGGAAAUGAAGAAAGUA | 20 |
| 29N3 | | 1290 | UACUUUCUUCAUUUCCACCUUU | 22 |
| RD-12559 | SOD1 | 1197 | mA*fG*mGfUmGfGmAfAfAfUfGfAmAfGmAfAmAfG*mU*fA-S9- | 34 |
| | | | meU*meU*meG*meU*meA*meU*meU*meC*meU*meA*meU*meG*meU*meU | |
| | | 57 | VPmU*fA*mCfUmUfUmCfUmUfCmAfUmUfUmCfCmAfCmCfU*mU*fU | 22 |
| RD-12952 | SOD1 | 1209 | mA*fG*mGfUmGfGmAfAfAfUfGfAmAfGmAfAmAfG*mU*fA-L9- | 34 |
| | | | meU*meU*meG*meU*meA*meU*meU*meC*meU*meU*meG*meU*meA*meU | |
| | | 57 | VPmU*fA*mCfUmUfUmCfUmUfCmAfUmUfUmCfCmAfCmCfU*mU*fU | 22 |
| RD-12982 | SOD1 | 1239 | mA*fG*mGfUmGfGmAfAfAfUfGfAmAfGmAfAmAfG*mU*fA-L9- | 31 |
| | | | meU*meU*meG*meU*meA*meU*meU*meC*meU*meA*meU | |
| | | 57 | VPmU*fA*mCfUmUfUmCfUmUfCmAfUmUfUmCfCmAfCmCfU*mU*fU | 22 |
| RD-12983 | SOD1 | 1240 | mA*fG*mGfUmGfGmAfAfAfUfGfAmAfGmAfAmAfG*mU*fA-L9- | 30 |
| | | | meU*meU*meG*meU*meA*meU*meU*meC*meU*meA | |
| | | 57 | VPmU*fA*mCfUmUfUmCfUmUfCmAfUmUfUmCfCmAfCmCfU*mU*fU | 22 |
| RD-12979 | SOD1 | 1236 | mA*fG*mGfUmGfGmAfAfAfUfGfAmAfGmAfAmAfG*mU*fA-L9- | 34 |
| | | | mU*mU*mG*mU*mA*mU*mU*mC*mU*mA*mU*mG*mU*mU | |
| | | 57 | VPmU*fA*mCfUmUfUmCfUmUfCmAfUmUfUmCfCmAfCmCfU*mU*fU | 22 |
| RD-13015 | SOD1 | 1272 | mA*fG*mGfUmGfGmAfAfAfUfGfAmAfGmAfAmAfG*mU*fA-L9- | 34 |
| | | | meG*meU*meA*meA*meA*meG*meU*meG*meA*meG*meC*meA*meU*meA | |
| | | 57 | VPmU*fA*mCfUmUfUmCfUmUfCmAfUmUfUmCfCmAfCmCfU*mU*fU | 22 |
| RD-13006 | SOD1 | 1263 | mA*fG*mGfUmGfGmAfAfAfUfGfAmAfGmAfAmAfG*mU*fA-L9- | 34 |
| | | | meU*meA*meU*meG*meU*meC*meG*meU*meA*meU*meU*meG*meU*meA | |
| | | 57 | VPmU*fA*mCfUmUfUmCfUmUfCmAfUmUfUmCfCmAfCmCfU*mU*fU | 22 |
| RD-12998 | SOD1 | 1255 | mA*fG*mGfUmGfGmAfAfAfUfGfAmAfGmAfAmAfG*mU*fA-L9- | 34 |
| | | | meC*meC*meG*meC*meU*meC*meC*meC*meC*meC*meC*meU*meA*meC | |
| | | 57 | VPmU*fA*mCfUmUfUmCfUmUfCmAfUmUfUmCfCmAfCmCfU*mU*fU | 22 |
| RD-13150 | SOD1 | 1291 | mA*fG*mGfUmG-C6x1-mAfAfAfUfGfAmAfGmAfAmAfG*mU*fA | 19 |
| | | 57 | VPmU*fA*mCfUmUfUmCfUmUfCmAfUmUfUmCfCmAfCmCfU*mU*fU | 22 |
| RD-13151 | SOD1 | 1292 | mA*fG*mGfUmG-C6x2-mAfAfAfUfGfAmAfGmAfAmAfG*mU*fA | 19 |
| | | 57 | VPmU*fA*mCfUmUlUmCfUmUfCmAfUmUfUmCfCmAfCmCfU*mU*fU | 22 |
| RD-13356 | SOD1 | 1293 | mA*fG*mGfUmG-C6x5-mAfAfAfUfGfAmAfGmAfAmAfG*mU*fA | 19 |
| | | 57 | VPmU*fA*mCfUmUfUmCfUmUfCmAfUmUfUmCfCmAfCmCfU*mU*fU | 22 |
| RD-13351 | SOD1 | 1294 | mA*fG*mGfUmG-(C6x7- | 33 |
| | | | meU*meU*meG*meU*meA*meU*meU*meC*meU*meA*meU*meG*meU*meU)- | |
| | | | mAfAfAfUfGfAmAfGmAfAmAfG*mU*fA | |
| | | 57 | VPmU*fA*mCfUmUfUmCfUmUfCmAfUmUfUmCfCmAfCmCfU*mU*fU | 22 |
| RD-13180 | SOD1 | 1295 | mA*fG*mGfUmGfGmAfAfAfUfGfAmAfGmAfAmAfG*mU*fA*S9*meU*meU*meG | 34 |
| | | | *meU*meA*meU*meU*meC*meU*meA*meU*meG*meU*meU | |
| | | 57 | VPmU*fA*mCfUmUfUmCfUmUfCmAfUmUfUmCfCmAfCmCfU*mU*fU | 22 |
| RD-12941 | SOD1 | 1296 | mA*fG*mGfUmGfGmAfAfAfUfGfAmAfGmAfAmAfG*mU*fA-S18- | 34 |
| | | | meU*meU*meG*meU*meA*meU*meU*meC*meU*meA*meU*meG*meU*meU | |
| | | 57 | VPmU*fA*mCfUmUfUmCfUmUfCmAfUmUfUmCfCmAfCmCfU*mU*fU | 22 |
| RD-12942 | SOD1 | 1297 | mA*fG*mGfUmGfGmAfAfAfUfGfAmAfGmAfAmAfG*mU*fA-C6- | 34 |
| | | | meU*meU*meG*meU*meA*meU*meU*meC*meU*meA*meU*meG*meU*meU | |
| | | 57 | VPmU*fA*mCfUmUfUmCfUmUfCmAfUmUfUmCfCmAfCmCfU*mU*fU | |
| RD-12967 | SOD1 | 1298 | mA*fG*mGfUmGfGmAfAfAfUfGfAmAfGmAfAmAfG*mU*fA-L9- | 34 |
| | | | meU*meUmeGmeUmeAmeUmeUmeCmeUmeAmeUmeGmeU*meU | |
| | | 57 | VPmU*fA*mCfUmUfUmCfUmUfCmAfUmUfUmCfCmAfCmCfU*mU*fU | 22 |

¶n.b.: upper case, RNA; *, phosphorothioate (PS) backbone modification; f, 2′-fluoro; m, 2′-O-methyl (2′-OMe); me, 2′-O-methoxyethyl (2′MOE); VP, 5′-(E)-vinylphosphonate; C, 5′-methyl cytosine; U, 5′-methyl uracil; S9, spacer-9 linker; C6x1, C6x1 linker; C6x2, C6x2 linker; C6x5, C6x5 linker; C6x7, C6x7 linker,

### EQUIVALENTS AND INCORPORATION BY REFERENCE

[0658] All references cited herein are incorporated by reference to the same extent as if each individual publication, database entry (e.g., Genbank sequences or GeneID entries), patent application, or patent, was specifically and individually indicated incorporated by reference in its entirety, for all purposes. This statement of incorporation by reference is intended by Applicants, pursuant to 37 C.F.R. § 1.57(b)(1), to relate to each and every individual publication, database entry (e.g., Genbank sequences or GeneID entries), patent application, or patent, each of which is clearly identified in compliance with 37 C.F.R. § 1.57(b)(2), even if such citation is not immediately adjacent to a dedicated statement of incorporation by reference. The inclusion of dedicated statements of incorporation by reference, if any, within the specification does not in any way weaken this general statement of incorporation by reference. Citation of the references herein is not intended as an admission that the reference is pertinent prior art, nor does it constitute any admission as to the contents or date of these publications or documents.

[0659] While the application has been particularly shown and described with reference to a preferred embodiment and various alternate embodiments, it is understood by persons skilled in the relevant art that various changes in form and details can be made therein without departing from the spirit and scope of the application.

1. An oligonucleotide agent comprising a non-targeting single-stranded oligonucleotide, wherein the single-stranded oligonucleotide is at least 6 nucleotides in length, wherein the single-stranded oligonucleotide is capable of facilitating delivery of a double-stranded oligonucleotide, wherein at least one phosphodiester bond between two adjacent nucleotides in the single-stranded oligonucleotide sequence is substituted by a phosphorothioate (PS), mesyl phosphoramidate or boranophosphate bond; and wherein the double-stranded oligonucleotide comprises a sense strand and an antisense strand.

2. (canceled)

3. (canceled)

4. The oligonucleotide agent according to claim 1, wherein the single-stranded oligonucleotide and the double-stranded oligonucleotide is conjugated with zero, one or more linking components.

5. The oligonucleotide agent according to claim 1, wherein all nucleotides of the single-stranded oligonucleotide are non-chemically modified nucleotides, or at least one nucleotide is a chemically modified nucleotide; and/or wherein all nucleotides of the double-stranded oligonucleotide are non-chemically modified nucleotides, or at least one nucleotide is a chemically modified nucleotide, or at least one phosphodiester bond between two adjacent nucleotides in the nucleotide sequence is substituted by a phosphorothioate, mesyl phosphoramidate or boranophosphate bond.

6. (canceled)

7. The oligonucleotide agent according to claim 5, wherein the chemically modified nucleotide comprises one or more of the following modifications:
a. modification of 2′-OH of the ribose in the nucleotide;
b. modification or absence of a base moiety on the nucleoside ring in the nucleotide;
c. a nucleotide being a locked or bridged nucleic acid, and
d. a nucleotide being a deoxyribonucleotide (DNA); and/or
wherein the chemically modified nucleotide has a 2′-OH ribose modification selected from: a 2′-fluoro-2′-deoxynucleoside (2′-F) modification, a 2′-O-methyl (2′-O-Me) modification, and a 2′-O-(2-methoxyethyl) (2′-O-MOE) modification; and/or
wherein the single-stranded oligonucleotide is composed of one or more nucleotides selected from the group of RNA, DNA, bridged nucleic acid (BNA), locked nucleic acid (LNA) and peptide nucleic acid (PNA).

8. (canceled)

9. (canceled)

10. The oligonucleotide agent according to claim 1, wherein the single-stranded oligonucleotide comprises at least one phosphorothioate (PS) backbone substitution.

11. (canceled)

12. (canceled)

13. The oligonucleotide agent according to claim 5, wherein the at least one chemically modified nucleotide is a nucleotide having an addition of a 5′-phosophate moiety at the 5′ end of the nucleotide sequence, or a nucleotide having an addition of a 5-methyl cytosine moiety at the 5′ end of the nucleotide sequence.

14. The oligonucleotide agent according to claim 13, wherein at least one chemically modified nucleotide is a nucleotide having an addition of a 5′-(E)-vinylphosphonate moiety.

15. (canceled)

16. The oligonucleotide agent according to claim 1, wherein the single-stranded oligonucleotide is 6-22 nucleotides in length.

17. (canceled)

18. (canceled)

19. The oligonucleotide agent according to claim 1, wherein the single strand oligonucleotide comprises:
1) a nucleotide sequence that is at least 90% identical to the nucleotide sequence selected from the group consisting of SEQ ID NOs: 1-22;
2) a chemically modified nucleotide sequence that is at least 80% identical to a nucleotide sequence selected from the group of SEO ID NOs: 1299-1379; or
3) a chemically modified nucleotide sequence having 0, 1, 2 or 3 different chemical modifications than a nucleotide sequence selected from the group consisting of SEO ID NOs: 1299-1379.

20. The oligonucleotide agent according to claim 1, wherein the nucleotide sequence of the single-stranded oligonucleotide comprises 35-65% adenines; and/or
wherein the nucleotide sequence of the single-stranded oligonucleotide comprises 35-72% cytosines; and/or
wherein the nucleotide sequence of the single-stranded oligonucleotide comprises 35-65% guanosines; and/or
wherein the nucleotide sequence of the single-stranded oligonucleotide comprises 35-72% uracil; and/or
wherein the nucleotide sequence of the single-stranded oligonucleotide comprises 64-78% purines; and/or
wherein the nucleotide sequence of the single-stranded oligonucleotide comprises 64-86% pyrimidines; and/or
wherein the nucleotide sequence of the single-stranded oligonucleotide comprises 42-58% purines and 42-58% pyrimidines.

21. (canceled)

22. (canceled)

23. (canceled)

24. (canceled)

25. (canceled)

26. (canceled)

27. The oligonucleotide agent according to claim 1, wherein the nucleotide sequence of the single-stranded oligonucleotide comprises at least about 14%, at least about 28%, at least about 42%, at least about 57%, at least about 71%, at least about 85%, at least about 92%, or about 100% of the nucleotides having a 2′Ome modification.

28. The oligonucleotide agent according to claim 1, wherein the nucleotide sequence of the single-stranded oligonucleotide is a palindrome sequence.

29. (canceled)

30. (canceled)

31. The oligonucleotide agent according to claim 1, wherein one or more of the double-stranded oligonucleotide and one or more of the single-stranded oligonucleotide are covalently conjugated by a linking component.

32. (canceled)

33. (canceled)

34. (canceled)

35. (canceled)

36. (canceled)

37. (canceled)

38. (canceled)

39. (canceled)

40. (canceled)

41. (canceled)

42. The oligonucleotide agent according to claim 31, wherein the linking component conjugated with the nucleotide in the single-stranded oligonucleotide or the double-stranded oligonucleotide, or both the single-stranded oligonucleotide and the double-stranded oligonucleotide through a phosphorothioate (PS) bond.

43. (canceled)

44. (canceled)

45. The oligonucleotide agent according to claim 4, wherein the linking component comprises a direct bond, or an oxygen or sulfur atom, or a unit selected from the following group: NR1, C(O), C(O)O, C(O)NR1, SO, SO2, and SO2NH; where R1 is hydrogen, acyl, aliphatic or substituted aliphatic; or the linking component is selected from the group consisting of: substituted or unsubstituted alkyl, substituted or unsubstituted alkenyl, substituted or unsubstituted alkynyl, arylalkyl, arylalkenyl, arylalkynyl, heteroarylalkyl, heteroarylalkenyl, heteroarylalkynyl, heterocyclylalkyl, heterocyclylalkenyl, heterocyclylalkynyl, aryl, heteroaryl, heterocyclyl, cycloalkyl, cycloalkenyl, alkylarylalkyl, alkylarylalkenyl, alkylarylalkynyl, alkenylarylalkyl, alkenylarylalkenyl, alkenylarylalkynyl, alkynylarylalkyl, alkynylarylalkenyl, alkynylarylalkynyl, alkylheteroarylalkyl, alkylheteroarylalkenyl, alkylheteroarylalkynyl, alkenylheteroarylalkyl, alkenylheteroarylalkenyl, alkenylheteroarylalkynyl, alkynylheteroarylalkyl, alkynylheteroarylalkenyl, alkynylheteroarylalkynyl, alkylheterocyclylalkyl alkylheterocyclylalkenyl, alkylhererocyclylalkynyl, alkenylheterocyclylalkyl, alkenylheterocyclylalkenyl, alkenylheterocyclylalkynyl, alkynylheterocyclylalkyl, alkynylheterocyclylalkenyl, alkynylheterocyclylalkynyl, alkylaryl, alkenylaryl, alkynylaryl, alkylheteroaryl, alkenylheteroaryl, alkynylhereroaryl, wherein one or more methylenes are interrupted or terminated by O, S, S(O), SO2, N(R′)2, C(O), cleavable linking group, substituted or unsubstituted aryl, substituted or unsubstituted heteroaryl, and substituted or unsubstituted heterocyclic; or
the linking component is selected from one or more of an ethylene glycol chain, an alkyl chain, an alkenyl chain, an alkynyl chain, a peptide, carbohydrates, thiol linkage, a phosphodiester, a phosphorothioate, a phosphoramidate, an amide, a carbamate, a tetrazole linkage, and a benzimidazole linkage.

46. (canceled)

47. (canceled)

48. The oligonucleotide agent according to claim 4, wherein the linking component is selected from the group consisting of:
a) L1 or S18 (spacer-18 linker) (1,1-bis(4-methoxyphenyl)-1-phenyl-2,5,8,11,14,17-hexaoxanonadecan-19-yl (2-cyanoethyl) diisopropylphosphoramidite);
b) L4 or C6 (spacer-C6 linker) (6-(bis(4-methoxyphenyl)(phenyl)methoxy)hexyl (2-cyanoethyl) diisopropylphosphoramidite);
c) L6 (1,1-bis(4-methoxyphenyl)-1-phenyl-2,5,8,11,14-pentaoxahexadecan-16-yl (2-cyanoethyl) diisopropylphosphoramidite);
d) L9 or S9 (spacer-9 linker) (2-(2-(2-(bis(4-methoxyphenyl)(phenyl)methoxy)ethoxy)ethoxy)ethyl (2-cyanoethyl) diisopropylphosphoramidite);
e) L10 or C3 (spacer-C3 linker) (3-(bis(4-methoxyphenyl)(phenyl)methoxy)propyl (2-cyanoethyl) diisopropylphosphoramidite);
f) L12 (d spacer) ((2R,3S)-2-((bis(4-methoxyphenyl)(phenyl)methoxy)methyl)tetrahydrofuran-3-yl (2-cyanoethyl) diisopropylphosphoramidite);
g) L13 or C12 (spacer-C12 linker) (12-(bis(4-methoxyphenyl)(phenyl)methoxy)dodecyl (2-cyanoethyl) diisopropylphosphoramidite);
h) L14 (spacer-L14 linker) (((1r,4r)-4-((bis(4-methoxyphenyl)(phenyl)methoxy)methyl)cyclohexyl)methyl (2-cyanoethyl) diisopropylphosphoramidite);
i) L15 (spacer-L15 linker) (4-(2-(bis(4-methoxyphenyl)(phenyl)methoxy)ethyl)phenethyl (2-cyanoethyl) diisopropylphosphoramidite);
j) L16 (spacer-L16 linker) (2-(1-(2-(bis(4-methoxyphenyl)(phenyl)methoxy)ethyl)cyclohexyl)ethyl(2-cyanoethyl) diisopropylphosphoramidite);
k) C6x1 ((2S,3S,4S,5S)-2-((bis(4-methoxyphenyl)(phenyl)methoxy)methyl)-5-methoxy-4-(pent-4-yn-1-yloxy)tetrahydrofuran-3-yl (2-cyanoethyl) diisopropylphosphoramidite);
l) C6x2 ((2S,3S,4S,5S)-5-((bis(4-methoxyphenyl)(phenyl)methoxy)methyl)-2-methoxy-4-(pent-4-yn-1-yloxy)tetrahydrofuran-3-yl (2-cyanoethyl) diisopropylphosphoramidite);
m) C6x5 (2-((2-(bis(4-methoxyphenyl)(phenyl)methoxy)ethyl)(pent-4-yn-1-yl)amino)ethyl (2-cyanoethyl) diisopropylphosphoramidite); and
n) C6x7 ((9H-fluoren-9-yl)methyl (4-((2S,4R)-2-((bis(4-methoxyphenyl)(phenyl)methoxy)methyl)-4-((bis(diisopropylamino)phosphanyl)oxy)pyrrolidin-1-yl)-4-oxobutyl)carbamate).

49. The oligonucleotide agent of claim 4, wherein the oligonucleotide agent comprises a nucleotide sequence that is at least 90% identical to the nucleotide sequences selected from the group consisting of:
1) siSOD1M2-AC2 (N22)-S1V3v-Qu5 (SEQ ID NO: 58) and an antisense strand having a nucleotide sequence of SEQ ID NO: 57 that has partial complementarity with the sense strand of siSOD1M2-AC2 (N22)-S1V3v-Qu5 (SEQ ID NO: 58);
2) siSOD1M2-AC2 (N15)-S1V3v-Qu5 (SEQ ID NO: 60) and an antisense strand having a nucleotide sequence of SEQ ID NO: 57 that has partial complementarity with the sense strand of siSOD1M2-AC2 (N15)-S1V3v-Qu5 (SEQ ID NO: 60);
3) siSOD1M2-AC2 (N12)-S1V3v-Qu5 (SEQ ID NO: 62) and an antisense strand having a nucleotide sequence of SEQ ID NO: 57 that has partial complementarity with the sense strand of siSOD1M2-AC2 (N12)-S1V3v-Qu5 (SEQ ID NO: 62); and
4) siSOD1M2-AC2 (N6)-S1V3v-Qu5 (SEQ ID NO: 64) and an antisense strand having a nucleotide sequence of SEQ ID NO: 57 that has partial complementarity with the sense strand of siSOD1M2-AC2 (N6)-S1V3v-Qu5 (SEQ ID NO: 64);
5) siHTT-AC2-S1L1 (SEQ ID NO: 28) and an antisense strand having a nucleotide sequence of SEQ ID NO: 27 that has partial complementarity with the sense strand of siHTT-AC2-S1L1 (SEQ ID NO: 28);
6) siApp-8-AC2 (N18)-S1L1V3v (SEQ ID NO: 32) and an antisense strand having a nucleotide sequence of SEQ ID NO: 31 that has partial complementarity with the sense strand of siApp-8-AC2 (N18)-S1L1V3v (SEQ ID NO: 32);
7) siApp-8-AC2 (N15)-S1L1V3v (SEQ ID NO: 34) and an antisense strand having a nucleotide sequence of SEQ ID NO: 31 that has partial complementarity with the sense strand of siApp-8-AC2 (N15)-S1L1V3v (SEQ ID NO: 34);
8) siApp-8-AC2 (N12)-S1L1V3v (SEQ ID NO: 36) and an antisense strand having a nucleotide sequence of SEQ ID NO: 31 that has partial complementarity with the sense strand of siApp-8-AC2 (N12)-S1L1V3v (SEQ ID NO: 36);
9) R6-04M1-AC2 (18)-S1L1V3v (SEQ ID NO: 68) and an antisense strand having a nucleotide sequence of SEQ ID NO: 67 that has partial complementarity with the sense strand of R6-04M1-AC2 (18)-S1L1V3v (SEQ ID NO: 68);
10) R6-04M1-AC2 (16)-S1L1V3v (SEQ ID NO: 70) and an antisense strand having a nucleotide sequence of SEQ ID NO: 67 that has partial complementarity with the sense strand of R6-04M1-AC2 (16)-S1L1V3v (SEQ ID NO: 70);
11) R6-04M1-AC2 (15)-S1L1V3v (SEQ ID NO: 72) and an antisense strand having a nucleotide sequence of SEQ ID NO: 67 that has partial complementarity with the sense strand of R6-04M1-AC2 (15)-S1L1V3v (SEQ ID NO: 72);
12) R6-04M1-AC2 (14)-S1L1V3v (SEQ ID NO: 74) and an antisense strand having a nucleotide sequence of SEQ ID NO: 67 that has partial complementarity with the sense strand of R6-04M1-AC2 (14)-S1L1V3v (SEQ ID NO: 74);
13) R6-04M1-AC2 (13)-S1L1V3v (SEQ ID NO: 76) and an antisense strand having a nucleotide sequence of SEQ ID NO: 67 that has partial complementarity with the sense strand of R6-04M1-AC2 (13)-S1L1V3v (SEQ ID NO: 76);
14) R6-04M1-AC2 (12)-S1L1V3v (SEQ ID NO: 78) and an antisense strand having a nucleotide sequence of SEQ ID NO: 67 that has partial complementarity with the sense strand of R6-04M1-AC2 (12)-S1L1V3v (SEQ ID NO: 78);
15) R6-04M1-AC2 (11)-S1L1V3v (SEQ ID NO: 80) and an antisense strand having a nucleotide sequence of SEQ ID NO: 67 that has partial complementarity with the sense strand of R6-04M1-AC2 (11)-S1L1V3v (SEQ ID NO: 80);
16) R6-04M1-AC2 (10)-S1L1V3v (SEQ ID NO: 82) and an antisense strand having a nucleotide sequence of SEQ ID NO: 67 that has partial complementarity with the sense strand of R6-04M1-AC2 (10)-S1L1V3v (SEQ ID NO: 82);
17) R6-04M1-AC2 (9)-S1L1V3v (SEQ ID NO: 84) and an antisense strand having a nucleotide sequence of SEQ ID NO: 67 that has partial complementarity with the sense strand of R6-04M1-AC2 (9)-S1L1V3v (SEQ ID NO: 84); and
18) R6-04M1-AC2 (8)-S1L1V3v (SEQ ID NO: 86) and an antisense strand having a nucleotide sequence of SEQ ID NO: 67 that has partial complementarity with the sense strand of R6-04M1-AC2 (8)-S1L1V3v (SEQ ID NO: 86).

50. (canceled)

51. (canceled)

52. (canceled)

53. (canceled)

54. The oligonucleotide agent according to claim 1, wherein the single-stranded oligonucleotide or the double-stranded oligonucleotide is conjugated to one or more conjugation groups.

55. (canceled)

56. (canceled)

57. (canceled)

58. (canceled)

59. The oligonucleotide agent according to claim 1, wherein the double-stranded oligonucleotide is a small interfering RNA (siRNA) or a small activating RNA (saRNA).

60. The oligonucleotide agent according to claim 1, wherein the sense or antisense strand of the double-stranded oligonucleotide has a nucleotide sequence that is at least 90% identical to the nucleotide sequence siApp-8-S1V1 (SEQ ID NO: 28) or siApp-8-S1V1 (SEQ ID NO: 27); or the sense or antisense strand of the double-stranded oligonucleotide has a nucleotide sequence that is at least 90% identical to the nucleotide sequence R6-04 (20)-S1V1v (CM-4) (SEQ ID NO: 66) or R6-04 (20)-S1V1v (CM-4) (SEQ ID NO: 67).

61. The oligonucleotide agent according to claim 1, wherein the oligonucleotide agent comprises a small interfering RNA (siRNA), wherein the siRNA comprises a sense strand and an antisense strand to form a duplex structure, wherein the antisense strand comprises a nucleotide sequence comprising at least 10 contiguous nucleotides, with 0, 1, 2 or 3 mismatches, and having at least 85% nucleotide sequence complementarity or homology to a portion of the nucleotide sequence of SEQ ID NO: 895, SEQ ID NO: 59, SEQ ID NO: 61, SEQ ID NO:61, or any one of SEQ ID NO: 1068-1113; wherein the oligonucleotide agent is capable of inhibiting expression of superoxide dismutase 1 (SOD1) in a cell.

62. The oligonucleotide agent according to claim 61, wherein the sense strand of the double-stranded oligonucleotide has a nucleotide sequence that is at least 90% identical to the nucleotide sequence selected from the group consisting of: siSOD1-5 (SEQ ID NO: 357), siSOD1-8 (SEQ ID NO: 358), siSOD1-10 (SEQ ID NO:
359), siSOD1-11 (SEQ ID NO: 360), siSOD-17 (SEQ ID NO: 357), siSOD1-35 (SEQ ID NO: 362), and siSOD1-37 through siSOD1-447 (SEQ ID NOs: 363-624), siSOD1-547 through siSOD1-694 (SEQ ID NOs: 976-1021), siSOD1-231-E (SEQ ID NO: 38), siSOD1-231-TT (SEQ ID NO: 40), siSOD1-231-M1 (SEQ ID NO: 42), siSOD1-231-S2 (SEQ ID NO: 44), siSOD1-388-E (SEQ ID NO: 46), siSOD1-388-TT (SEQ ID NO: 48), siSOD1-388-M1 (SEQ ID NO: 50), siSOD1-388-S2 (SEQ ID NO: 52), siSODIM2-L1 (SEQ ID NO: 54), and siSODIM2-S1V5 (SEQ ID NO: 56).

63. The oligonucleotide agent according to claim 61, wherein the antisense strand of the double-stranded oligonucleotide has a nucleotide sequence that is at least 90% identical to the nucleotide sequence selected from the group consisting of: siSOD1-5 (SEQ ID NO: 626), siSOD1-8 (SEQ ID NO: 627), siSOD1-10 (SEQ ID NO: 628), siSOD1-11 (SEQ ID NO: 629), siSOD-17 (SEQ ID NO: 630), siSOD1-35 (SEQ ID NO: 631), and siSOD1-37-through siSOD1-447 (SEQ ID NOs: 632-893), siSOD1-547 through siSOD1-694 (SEQ ID NOs: 1022-1067), siSOD1-231-E (SEQ ID NO: 39), siSOD1-231-TT (SEQ ID NO: 41), siSOD1-231-M1 (SEQ ID NO: 43), siSOD1-231-S2 (SEQ ID NO: 45), siSOD1-388-E (SEQ ID NO: 47), siSOD1-388-TT (SEQ ID NO: 49), siSOD1-388-M1 (SEQ ID NO: 51), siSOD1-388-S2 (SEQ ID NO: 53), siSODIM2-L1 (SEQ ID NO: 47); and siSOD1M2-S1V1v-Qu5 (SEQ ID NO: 57).

64. (canceled)

65. (canceled)

66. The oligonucleotide agent according to claim 6160, wherein the sense strand of the siRNA has a nucleotide sequence that has at least 85% homology to the nucleotide sequence selected from the group consisting of: DS17-0001 (SEQ ID NO: 384), DS17-0002 (SEQ ID NO: 372), DS17-0003 (SEQ ID NO: 409), DS17-0004 (SEQ ID NO: 357), DS17-0005 (SEQ ID NO: 486), DS17-0029 (SEQ ID NO: 588), DS17-01N3 (SEQ ID NO: 912), DS17-02N3 (SEQ ID NO: 914), DS17-03N3 (SEQ ID NO: 916), DS17-04N3 (SEQ ID NO: 918), DS17-05N3 (SEQ ID NO: 920) and SEQ ID NOs: 976-1021.

67. The oligonucleotide agent according to claim 61, wherein the antisense strand of the siRNA has a nucleotide sequence that has at least 85% homology to the nucleotide sequence selected from the group consisting of: DS17-0001 (SEQ ID NO: 653), DS17-0002 (SEQ ID NO: 641), DS17-0003 (SEQ ID NO: 678), DS17-0004 (SEQ ID NO: 626), DS17-0005 (SEQ ID NO: 755), DS17-0029 (SEQ ID NO: 857), DS17-01N3 (SEQ ID NO: 913), DS17-02N3 (SEQ ID NO: 915), DS17-03N3 (SEQ ID NO: 917), DS17-04N3 (SEQ ID NO: 919), DS17-05N3 (SEQ ID NO: 921), and SEQ ID NOs: 1022-1067.

68. The oligonucleotide agent according to claim 61, wherein the sense strand and the antisense strand of the siRNA have nucleotide sequences that are independently at least 85% homologous to the nucleotide sequence pairs selected from the following groups:
(a)
(SEQ ID NO: 384 and SEQ ID NO: 653)
DS17-0001,
(b)
(SEQ ID NO: 372 and SEQ ID NO: 641)
DS17-0002,
(c)
(SEQ ID NO: 409 and SEQ ID NO: 678)
DS17-0003,
(d)
(SEQ ID NO: 357 and SEQ ID NO: 626)
DS17-0004,
(e)
(SEQ ID NO: 486 and SEQ ID NO: 755)
DS17-0005,
(f)
(SEQ ID NO: 588 and SEQ ID NO: 857)
DS17-0029,
(g)
(SEQ ID NO: 912 and SEQ ID NO: 913)
DS17-01N3,
(h)
(SEQ ID NO: 914 and SEQ ID NO: 915)
DS17-02N3,
(i)
(SEQ ID NO: 916 and SEQ ID NO: 917)
DS17-03N3,
(j)
(SEQ ID NO: 918 and SEQ ID NO: 919)
DS17-04N3,
(k)
(SEQ ID NO: 920 and SEQ ID NO: 921)
DS17-05N3,
(l)
(SEQ ID NO: 922 and SEQ ID NO: 923)
DS17-01M3,
(m)
(SEQ ID NO: 924 and SEQ ID NO: 925)
DS17-02M3,
(n)
(SEQ ID NO: 926 and SEQ ID NO: 927)
DS17-03M3,
(o)
(SEQ ID NO: 928 and SEQ ID NO: 929)
DS17-04M3,
and
(p)
(SEQ ID NO: 930 and SEQ ID NO: 931)
DS17-05M3.

69. (canceled)

70. The oligonucleotide agent according to claim 1, wherein the oligonucleotide agent comprises an siRNA and a non-targeting ACO, wherein the siRNA comprises a sense strand and an antisense strand, wherein the ACO comprises a nucleotide sequence that is at least 90%, at least 95%, or 100% identical to SEQ ID NO: 954, and the oligonucleotide agent is capable of inhibiting the expression of superoxide dismutase 1 (SOD1) in a cell.

71. The oligonucleotide agent according to claim 70, wherein the sense strand and the antisense strand of the siRNA have nucleotide sequences that independently are at least 85% homologous to the nucleotide sequence pairs selected from the following groups:
a.
(SEQ ID NO: 922 and SEQ ID NO: 923)
DS17-01M3,
b.
(SEQ ID NO: 924 and SEQ ID NO: 925)
DS17-02M3,
c.
(SEQ ID NO: 926 and SEQ ID NO: 927)
DS17-03M3,
d.
(SEQ ID NO: 928 and SEQ ID NO: 929)
DS17-04M3,
e.
(SEQ ID NO: 930 and SEQ ID NO: 931)
DS17-05M3,
f.
(SEQ ID NO: 932 and SEQ ID NO: 933)
DS17-01M3-AC1 (me14)-L9V3,
g.
(SEQ ID NO: 934 and SEQ ID NO: 935)
DS17-02M3-AC1 (me14)-L9V3,
h.
(SEQ ID NO: 936 and SEQ ID NO: 937)
DS17-03M3-AC1 (me14)-L9V3,
i.
(SEQ ID NO: 938 and SEQ ID NO: 939)
DS17-04M3-AC1 (me14)-L9V3,
j.
(SEQ ID NO: 940 and SEQ ID NO: 941)
DS17-05M3-AC1 (me14)-L9V3,
k.
(SEQ ID NO: 942 and SEQ ID NO: 47)
DS17-29M2-AC1 (me14)-L9V3,
l.
(SEQ ID NO: 932 and SEQ ID NO: 47)
DS17-01M3v-AC1 (me14)-L9V3,
m.
(SEQ ID NO: 934 and SEQ ID NO: 943)
DS17-02M3v-AC1 (me14)-L9V3,
n.
(SEQ ID NO: 936 and SEQ ID NO: 944)
DS17-03M3v-AC1 (me14)-L9V3,
o.
(SEQ ID NO: 938 and SEQ ID NO: 950)
DS17-04M3v-AC1 (me14)-L9V3,
p.
(SEQ ID NO: 940 and SEQ ID NO: 951)
DS17-05M3v-AC1 (me14)-L9V3,
and
q.
(SEQ ID NO: 952 and SEQ ID NO: 939)
DS17-04M3-asSOD1-1-L9V3.

72. The oligonucleotide agent according to claim 1, wherein the oligonucleotide agent comprises a non-targeting ACO conjugated sense strand of a siRNA and an antisense strand of the siRNA, wherein the non-targeting ACO conjugated sense strand comprises a linking component covalently conjugating the ACO and the sense strand, wherein the antisense strand comprises a nucleotide sequence that is at least 90%, at least 95% homology, or 100% identical to SEQ ID NO: 57.

73. The oligonucleotide agent according to the claim 72, wherein the non-targeting ACO conjugated sense strand comprises a nucleotide sequence that is at least 90%, at least 95%, or 100% identical to a nucleotide sequence selected from the group consisting of SEQ ID NOs: 1197-1288 and SEQ ID NOs: 1291-1298.

74. The oligonucleotide agent according to claim 72, wherein the linking component is selected from the linking component group listed in SEQ ID NOs: 1197-1288 in Table 28 and SEQ ID NOs: 1291-1298 in Table 30.

75-84. (canceled)

85. A pharmaceutical composition, comprising the oligonucleotide agent of claim 1 and optionally at least one pharmaceutically acceptable carrier selected from an aqueous carrier, liposome or LNP, polymer, micelle, colloid, metal nanoparticle, non-metallic nanoparticle, bioconjugates, and polypeptide.

86-111. (canceled)

112. A method of treatment comprising administering sufficient amount of the oligonucleotide agent of claim 1 to a subject in need thereof, wherein the treatment is one selected from the group consisting of:
1) silencing the SOD1 gene expression or decreases the SOD1 protein;
2) treating or delaying the onset or progression of Amyotrophic lateral sclerosis (ALS);
3) decreasing or inhibiting the expression of a HTT gene or huntingtin protein;
4) treating or delaying the onset or progression of Huntington's disease (HD);
5) increasing or activating the expression of an App gene or amyloid precursor protein (APP);
6) treating or delaying the onset or progression of APP associated diseases including Cerebral Amyloid Angiopathy App-related (CAA-APP) and Alzheimer Disease (AD);
7) increasing or activating the expression of an SMN2 gene or SMN2 protein; and
8) treating or delaying the onset or progression of spinal muscular atrophy (SMA).

The application's sequence listing, which the Patent Office published only in electronic form, follows.

SEQUENCE LISTING (1380 sequences)

SEQ ID NO: 1 - RNA, 22 nt, synthetic construct
  misc_feature 1..22: note = Synthetic oligonucleotide
  modified_base order(1,2,3,4,5,6,7,8,9,10,11,12,13,14,15,16,17,18,19,20,21,22): mod_base = OTHER; note = phosphorothioate (PS) backbone modification
  modified_base 1: mod_base = OTHER; note = L1, spacer 18 linker (1,1-bis(4-methoxyphenyl)-1-phenyl-2,5,8,11,14,17-hexaoxano nadecan-19-yl (2-cyanoethyl) diisopropylphosphoramidite);
  source 1..22: mol_type = other RNA
tagactagatcatatgagtaga

SEQ ID NO: 2 - RNA, 20 nt, synthetic construct
  misc_feature 1..20: note = Synthetic oligonucleotide
  modified_base order(1,2,3,4,5,6,7,8,9,10,11,12,13,14,15,16,17,18,19,20): mod_base = OTHER; note = phosphorothioate (PS) backbone modification
  modified_base 1: mod_base = OTHER; note = L1, spacer 18 linker (1,1-bis(4-methoxyphenyl)-1-phenyl-2,5,8,11,14,17-hexaoxano nadecan-19-yl (2-cyanoethyl) diisopropylphosphoramidite);
  source 1..20: mol_type = other RNA
tagactagatcatatgagta

SEQ ID NO: 3 - RNA, 18 nt, synthetic construct
  misc_feature 1..18: note = Synthetic oligonucleotide
  modified_base order(1,2,3,4,5,6,7,8,9,10,11,12,13,14,15,16,17,18): mod_base = OTHER; note = phosphorothioate (PS) backbone modification
  modified_base 1: mod_base = OTHER; note = L1, spacer 18 linker (1,1-bis(4-methoxyphenyl)-1-phenyl-2,5,8,11,14,17-hexaoxano nadecan-19-yl (2-cyanoethyl) diisopropylphospho
  source 1..18: mol_type = other RNA
tagactagatcatatgag

SEQ ID NO: 4 - RNA, 16 nt, synthetic construct
  misc_feature 1..16: note = Synthetic oligonucleotide
  modified_base order(1,2,3,4,5,6,7,8,9,10,11,12,13,14,15,16): mod_base = OTHER; note = phosphorothioate (PS) backbone modification
  modified_base 1: mod_base = OTHER; note = L1, spacer 18 linker (1,1-bis(4-methoxyphenyl)-1-phenyl-2,5,8,11,14,17-hexaoxano nadecan-19-yl (2-cyanoethyl) diisopropylphospho
  source 1..16: mol_type = other RNA
tagactagatcatatg

SEQ ID NO: 5 - RNA, 15 nt, synthetic construct
  misc_feature 1..15: note = Synthetic oligonucleotide
  modified_base order(1,2,3,4,5,6,7,8,9,10,11,12,13,14,15): mod_base = OTHER; note = phosphorothioate (PS) backbone modification
  modified_base 1: mod_base = OTHER; note = L1, spacer 18 linker (1,1-bis(4-methoxyphenyl)-1-phenyl-2,5,8,11,14,17-hexaoxano nadecan-19-yl (2-cyanoethyl) diisopropylphospho
  source 1..15: mol_type = other RNA
tagactagatcatat

SEQ ID NO: 6 - RNA, 14 nt, synthetic construct
  misc_feature 1..14: note = Synthetic oligonucleotide
  modified_base order(1,2,3,4,5,6,7,8,9,10,11,12,13,14): mod_base = OTHER; note = phosphorothioate (PS) backbone modification
  modified_base 1: mod_base = OTHER; note = L1, spacer 18 linker (1,1-bis(4-methoxyphenyl)-1-phenyl-2,5,8,11,14,17-hexaoxano nadecan-19-yl (2-cyanoethyl) diisopropylphospho
  source 1..14: mol_type = other RNA
tagactagatcata

SEQ ID NO: 7 - RNA, 12 nt, synthetic construct
  misc_feature 1..12: note = Synthetic oligonucleotide
  modified_base order(1,2,3,4,5,6,7,8,9,10,11,12): mod_base = OTHER; note = phosphorothioate (PS) backbone modification
  modified_base 1: mod_base = OTHER; note = L1, spacer 18 linker (1,1-bis(4-methoxyphenyl)-1-phenyl-2,5,8,11,14,17-hexaoxano nadecan-19-yl (2-cyanoethyl) diisopropylphospho
  source 1..12: mol_type = other RNA
tagactagatca

SEQ ID NO: 8 - RNA, 10 nt, synthetic construct
  misc_feature 1..10: note = Synthetic oligonucleotide
  modified_base order(1,2,3,4,5,6,7,8,9,10): mod_base = OTHER; note = phosphorothioate (PS) backbone modification
  modified_base 1: mod_base = OTHER; note = L1, spacer 18 linker (1,1-bis(4-methoxyphenyl)-1-phenyl-2,5,8,11,14,17-hexaoxano nadecan-19-yl (2-cyanoethyl) diisopropylphospho
  source 1..10: mol_type = other RNA
tagactagat

SEQ ID NO: 9-10 - skipped (2 entries)

SEQ ID NO: 11 - RNA, 22 nt, synthetic construct
  misc_feature 1..22: note = Synthetic oligonucleotide
  modified_base order(1,2,3,4,5,6,7,8,9,10,11,12,13,14,15,16,17,18,19,20,21,22): mod_base = OTHER; note = phosphorothioate (PS) backbone modification
  modified_base order(1,2,3,4,5,6,7,8,9,10,11,12,13,14,15,16,17,18,19,20,21,22): mod_base = OTHER; note = 2'-O-methoxyethyl (2 MOE)
  modified_base order(5,11): mod_base = OTHER; note = 5-methyl cytosine
  modified_base order(1,6,10,13,15,19): mod_base = OTHER; note = 5-methyl uracil
  modified_base 1: mod_base = OTHER; note = L1, spacer 18 linker (1,1-bis(4-methoxyphenyl)-1-phenyl-2,5,8,11,14,17-hexaoxano nadecan-19-yl (2-cyanoethyl) diisopropylphospho
  source 1..22: mol_type = other RNA
tagactagatcatatgagtaga

SEQ ID NO: 12 - RNA, 18 nt, synthetic construct
  misc_feature 1..18: note = Synthetic oligonucleotide
  modified_base order(1,2,3,4,5,6,7,8,9,10,11,12,13,14,15,16,17,18): mod_base = OTHER; note = phosphorothioate (PS) backbone modification
  modified_base order(1,2,3,4,5,6,7,8,9,10,11,12,13,14,15,16,17,18): mod_base = OTHER; note = 2'-O-methoxyethyl (2 MOE)
  modified_base order(5,11): mod_base = OTHER; note = 5-methyl cytosine
  modified_base order(1,6,10,13,15): mod_base = OTHER; note = 5-methyl uracil
  modified_base 1: mod_base = OTHER; note = L1, spacer 18 linker (1,1-bis(4-methoxyphenyl)-1-phenyl-2,5,8,11,14,17-hexaoxano nadecan-19-yl (2-cyanoethyl) diisopropylphospho
  source 1..18: mol_type = other RNA
tagactagatcatatgag

SEQ ID NO: 13 - RNA, 16 nt, synthetic construct
  misc_feature 1..16: note = Synthetic oligonucleotide
  modified_base order(1,2,3,4,5,6,7,8,9,10,11,12,13,14,15,16): mod_base = OTHER; note = phosphorothioate (PS) backbone modification
  modified_base order(1,2,3,4,5,6,7,8,9,10,11,12,13,14,15,16): mod_base = OTHER; note = 2'-O-methoxyethyl (2 MOE)
  modified_base order(5,11): mod_base = OTHER; note = 5-methyl cytosine
  modified_base order(1,6,10,13,15): mod_base = OTHER; note = 5-methyl uracil
  modified_base 1: mod_base = OTHER; note = L1, spacer 18 linker (1,1-bis(4-methoxyphenyl)-1-phenyl-2,5,8,11,14,17-hexaoxano nadecan-19-yl (2-cyanoethyl) diisopropylphospho
  source 1..16: mol_type = other RNA
tagactagatcatatg

SEQ ID NO: 14 - RNA, 15 nt, synthetic construct
  misc_feature 1..15: note = Synthetic oligonucleotide
  modified_base order(1,2,3,4,5,6,7,8,9,10,11,12,13,14,15): mod_base = OTHER; note = phosphorothioate (PS) backbone modification
  modified_base order(1,2,3,4,5,6,7,8,9,10,11,12,13,14,15): mod_base = OTHER; note = 2'-O-methoxyethyl (2 MOE)
  modified_base order(5,11): mod_base = OTHER; note = 5-methyl cytosine
  modified_base order(1,6,10,13,15): mod_base = OTHER; note = 5-methyl uracil
  modified_base 1: mod_base = OTHER; note = L1, spacer 18 linker (1,1-bis(4-methoxyphenyl)-1-phenyl-2,5,8,11,14,17-hexaoxano nadecan-19-yl (2-cyanoethyl) diisopropylphospho
  source 1..15: mol_type = other RNA
tagactagatcatat

SEQ ID NO: 15 - RNA, 14 nt, synthetic construct
  misc_feature 1..14: note = Synthetic oligonucleotide
  modified_base order(1,2,3,4,5,6,7,8,9,10,11,12,13,14): mod_base = OTHER; note = phosphorothioate (PS) backbone modification
  modified_base order(1,2,3,4,5,6,7,8,9,10,11,12,13,14): mod_base = OTHER; note = 2'-O-methoxyethyl (2 MOE)
  modified_base order(5,11): mod_base = OTHER; note = 5-methyl cytosine
  modified_base order(1,6,10,13): mod_base = OTHER; note = 5-methyl uracil
  modified_base 1: mod_base = OTHER; note = L1, spacer 18 linker (1,1-bis(4-methoxyphenyl)-1-phenyl-2,5,8,11,14,17-hexaoxano nadecan-19-yl (2-cyanoethyl) diisopropylphospho
  source 1..14: mol_type = other RNA
tagactagatcata

SEQ ID NO: 16 - RNA, 13 nt, synthetic construct
  misc_feature 1..13: note = Synthetic oligonucleotide
  modified_base order(1,2,3,4,5,6,7,8,9,10,11,12,13): mod_base = OTHER; note = phosphorothioate (PS) backbone modification
  modified_base order(1,2,3,4,5,6,7,8,9,10,11,12,13): mod_base = OTHER; note = 2'-O-methoxyethyl (2 MOE)
  modified_base order(5,11): mod_base = OTHER; note = 5-methyl cytosine
  modified_base order(1,6,10,13): mod_base = OTHER; note = 5-methyl uracil
  modified_base 1: mod_base = OTHER; note = L1, spacer 18 linker (1,1-bis(4-methoxyphenyl)-1-phenyl-2,5,8,11,14,17-hexaoxano nadecan-19-yl (2-cyanoethyl) diisopropylphospho
  source 1..13: mol_type = other RNA
tagactagatcat

SEQ ID NO: 17 - RNA, 12 nt, synthetic construct
  misc_feature 1..12: note = Synthetic oligonucleotide
  modified_base order(1,2,3,4,5,6,7,8,9,10,11,12): mod_base = OTHER; note = phosphorothioate (PS) backbone modification
  modified_base order(1,2,3,4,5,6,7,8,9,10,11,12): mod_base = OTHER; note = 2'-O-methoxyethyl (2 MOE)
  modified_base order(5,11): mod_base = OTHER; note = 5-methyl cytosine
  modified_base order(1,6,10): mod_base = OTHER; note = 5-methyl uracil
  modified_base 1: mod_base = OTHER; note = L1, spacer 18 linker (1,1-bis(4-methoxyphenyl)-1-phenyl-2,5,8,11,14,17-hexaoxano nadecan-19-yl (2-cyanoethyl) diisopropylphospho
  source 1..12: mol_type = other RNA
tagactagatca

SEQ ID NO: 18 - RNA, 11 nt, synthetic construct
  misc_feature 1..11: note = Synthetic oligonucleotide
  modified_base order(1,2,3,4,5,6,7,8,9,10,11): mod_base = OTHER; note = phosphorothioate (PS) backbone modification
  modified_base order(1,2,3,4,5,6,7,8,9,10,11): mod_base = OTHER; note = 2'-O-methoxyethyl (2 MOE)
  modified_base order(5,11): mod_base = OTHER; note = 5-methyl cytosine
  modified_base order(1,6,10): mod_base = OTHER; note = 5-methyl uracil
  modified_base 1: mod_base = OTHER; note = L1, spacer 18 linker (1,1-bis(4-methoxyphenyl)-1-phenyl-2,5,8,11,14,17-hexaoxano nadecan-19-yl (2-cyanoethyl) diisopropylphospho
  source 1..11: mol_type = other RNA
tagactagatc

SEQ ID NO: 19 - RNA, 10 nt, synthetic construct
  misc_feature 1..10: note = Synthetic oligonucleotide
  modified_base order(1,2,3,4,5,6,7,8,9,10): mod_base = OTHER; note = phosphorothioate (PS) backbone modification
  modified_base order(1,2,3,4,5,6,7,8,9,10): mod_base = OTHER; note = 2'-O-methoxyethyl (2 MOE)
  modified_base 5: mod_base = OTHER; note = 5-methyl cytosine
  modified_base order(1,6,10): mod_base = OTHER; note = 5-methyl uracil
  modified_base 1: mod_base = OTHER; note = L1, spacer 18 linker (1,1-bis(4-methoxyphenyl)-1-phenyl-2,5,8,11,14,17-hexaoxano nadecan-19-yl (2-cyanoethyl) diisopropylphospho
  source 1..10: mol_type = other RNA
tagactagat

SEQ ID NO: 20-22 - skipped (3 entries)

SEQ ID NO: 23 - DNA, 21 bp, synthetic construct
  misc_feature 1..21: note = Synthetic primer
  source 1..21: mol_type = other DNA
aaagatggtcaaggtcgcaag

SEQ ID NO: 24 - RNA, 21 nt, synthetic construct
  modified_base 20..21: mod_base = OTHER; note = thymine
  misc_feature 1..21: note = Synthetic oligonucleotide
  source 1..21: mol_type = other RNA
actactgagtgacagtagatt

SEQ ID NO: 25 - RNA, 21 nt, synthetic construct
  modified_base 20..21: mod_base = OTHER; note = thymine
  misc_feature 1..21: note = Synthetic oligonucleotide
  source 1..21: mol_type = other RNA
tctactgtcactcagtagttt

SEQ ID NO: 26 - RNA, 18 nt, synthetic construct
  misc_feature 1..18: note = Synthetic oligonucleotide
  modified_base order(1,2,3,16,17,18): mod_base = OTHER; note = phosphorothioate (PS) backbone modification
  modified_base order(7,9,10,11): mod_base = OTHER; note = 2'-fluoro
  modified_base order(1,2,3,4,5,6,8,12,13,14,15,16,17,18): mod_base = OTHER; note = 2'-O-methyl
  source 1..18: mol_type = other RNA
tatcagtaaagagattaa

SEQ ID NO: 27 - RNA, 20 nt, synthetic construct
  misc_feature 1..20: note = Synthetic oligonucleotide
  modified_base order(1,2,3,18,19,20): mod_base = OTHER; note = phosphorothioate (PS) backbone modification
  modified_base order(2,6,11,13): mod_base = OTHER; note = 2'-fluoro
  modified_base order(1,3,4,5,7,8,9,10,12,14,15,16,17,18,19,20): mod_base = OTHER; note = 2'-O-methyl
  modified_base 1: mod_base = OTHER; note = 5'-(E)-vinylphosphonate
  source 1..20: mol_type = other RNA
ttaatctctttactgatata

SEQ ID NO: 28 - RNA, 36 nt, synthetic construct
  misc_feature 1..36: note = Synthetic oligonucleotide
  modified_base order(1,2,3,16,17,18,19,20,21,22,23,24,25,26,27,28,29,30,31,32,33,34,35,36): mod_base = OTHER; note = phosphorothioate (PS) backbone modification
  modified_base order(7,9,10,11): mod_base = OTHER; note = 2'-fluoro
  modified_base order(1,2,3,4,5,6,8,12,13,14,15,16,17,18): mod_base = OTHER; note = 2'-O-methyl
  modified_base order(19,20,21,22,23,24,25,26,27,28,29,30,31,32,33,34,35,36): mod_base = OTHER; note = 2'-O-methoxyethyl (2 MOE)
  modified_base order(23,29): mod_base = OTHER; note = 5-methyl cytosine
  modified_base order(19,24,28,31,33): mod_base = OTHER; note = 5-methyl uracil
  modified_base 18: mod_base = OTHER; note = spacer-18 (S18 linker (1,1-bis(4-methoxyphenyl)-1-phenyl-2,5,8,11,14,17-hexaoxano nadecan-19-yl (2-cyanoethyl) diisopropylphosphoramidite)
  source 1..36: mol_type = other RNA
tatcagtaaagagattaatagactagatcatatgag

SEQ ID NO: 29 - DNA, 23 bp, synthetic construct
  misc_feature 1..23: note = Synthetic primer
  source 1..23: mol_type = other DNA
tagtcaagggcatatcctacaac

SEQ ID NO: 30 - RNA, 19 nt, synthetic construct
  misc_feature 1..19: note = Synthetic oligonucleotide
  modified_base order(1,2,3): mod_base = OTHER; note = phosphorothioate (PS) backbone modification
  modified_base order(1,3,5,7,9,10,11,13,15,17,19): mod_base = OTHER; note = 2'-fluoro
  modified_base order(2,4,6,8,12,14,16,18): mod_base = OTHER; note = 2'-O-methyl
  source 1..19: mol_type = other RNA
cccagaatcagctacggaa

SEQ ID NO: 31 - RNA, 21 nt, synthetic construct
  misc_feature 1..21: note = Synthetic oligonucleotide
  modified_base order(1,2,3,19,20,21): mod_base = OTHER; note = phosphorothioate (PS) backbone modification
  modified_base order(2,4,6,8,10,12,14,16,18,20): mod_base = OTHER; note = 2'-fluoro
  modified_base order(1,3,5,7,9,11,13,15,17,19,21): mod_base = OTHER; note = 2'-O-methyl
  modified_base 1: mod_base = OTHER; note = 5'-(E)-vinylphosphonate
  source 1..21: mol_type = other RNA
ttccgtagctgattctgggct

SEQ ID NO: 32 - RNA, 37 nt, synthetic construct
  misc_feature 1..37: note = Synthetic oligonucleotide
  modified_base order(1,2,3,20,21,22,23,24,25,26,27,28,29,30,31,32,33,34,35,36,37): mod_base = OTHER; note = phosphorothioate (PS) backbone modification
  modified_base order(1,3,5,7,9,10,11,13,15,17,19): mod_base = OTHER; note = 2'-fluoro
  modified_base order(2,4,6,8,12,14,16,18): mod_base = OTHER; note = 2'-O-methyl
  modified_base 19: mod_base = OTHER; note = spacer-18 (S18 linker (1,1-bis(4-methoxyphenyl)-1-phenyl-2,5,8,11,14,17-hexaoxano nadecan-19-yl (2-cyanoethyl) diisopropylphosphoramidite)
  source 1..37: mol_type = other RNA
cccagaatcagctacggaatagactagatcatatgag

SEQ ID NO: 33 - DNA, 50 bp, synthetic construct
  misc_feature 1..50: note = Synthetic primer
  source 1..50: mol_type = other DNA
gtcgtatccagtgcagggtccgaggtattcgcactggatacgactggcga

SEQ ID NO: 34 - RNA, 34 nt, synthetic construct
  misc_feature 1..34: note = Synthetic oligonucleotide
  modified_base order(1,2,3,20,21,22,23,24,25,26,27,28,29,30,31,32,33,34): mod_base = OTHER; note = phosphorothioate (PS) backbone modification
  modified_base order(1,3,5,7,9,10,11,13,15,17,19): mod_base = OTHER; note = 2'-fluoro
  modified_base order(2,4,6,8,12,14,16,18): mod_base = OTHER; note = 2'-O-methyl
  modified_base 19: mod_base = OTHER; note = spacer-18 (S18 linker (1,1-bis(4-methoxyphenyl)-1-phenyl-2,5,8,11,14,17-hexaoxano nadecan-19-yl (2-cyanoethyl) diisopropylphosphoramidite)
  source 1..34: mol_type = other RNA
cccagaatcagctacggaatagactagatcatat

SEQ ID NO: 35 - DNA, 20 bp, synthetic construct
  misc_feature 1..20: note = Synthetic primer
  source 1..20: mol_type = other DNA
atttaacgcacacggccttc

SEQ ID NO: 36 - RNA, 31 nt, synthetic construct
  misc_feature 1..31: note = Synthetic oligonucleotide
  modified_base order(1,2,3,20,21,22,23,24,25,26,27,28,29,30,31): mod_base = OTHER; note = phosphorothioate (PS) backbone modification
  modified_base order(1,3,5,7,9,10,11,13,15,17,19): mod_base = OTHER; note = 2'-fluoro
  modified_base order(2,4,6,8,12,14,16,18): mod_base = OTHER; note = 2'-O-methyl
  modified_base 19: mod_base = OTHER; note = spacer-18 (S18 linker (1,1-bis(4-methoxyphenyl)-1-phenyl-2,5,8,11,14,17-hexaoxano nadecan-19-yl (2-cyanoethyl) diisopropylphosphoramidite)
  source 1..31: mol_type = other RNA
cccagaatcagctacggaatagactagatca

SEQ ID NO: 37 - DNA, 16 bp, synthetic construct
  misc_feature 1..16: note = Synthetic primer
  source 1..16: mol_type = other DNA
gtgcagggtccgaggt

SEQ ID NO: 38 - RNA, 19 nt, synthetic construct
  misc_feature 1..19: note = Synthetic oligonucleotide
  modified_base order(1,2,3,17,18,19): mod_base = OTHER; note = phosphorothioate (PS) backbone modification
  modified_base order(1,3,5,7,9,10,11,13,15,17,19): mod_base = OTHER; note = 2'-fluoro
  modified_base order(2,4,6,8,12,14,16,18): mod_base = OTHER; note = 2'-O-methyl
  source 1..19: mol_type = other RNA
tgaagagaggcatgttgga

SEQ ID NO: 39 - RNA, 21 nt, synthetic construct
  misc_feature 1..21: note = Synthetic oligonucleotide
  modified_base order(1,2,3,19,20,21): mod_base = OTHER; note = phosphorothioate (PS) backbone modification
  modified_base order(2,4,6,8,10,12,14,16,18,20): mod_base = OTHER; note = 2'-fluoro
  modified_base order(1,3,5,7,9,11,13,15,17,19,21): mod_base = OTHER; note = 2'-O-methyl
  source 1..21: mol_type = other RNA
tccaacatgcctctcttcatc

SEQ ID NO: 40 - RNA, 19 nt, synthetic construct
  misc_feature 1..19: note = Synthetic oligonucleotide
  modified_base order(1,2,3,17,18,19): mod_base = OTHER; note = phosphorothioate (PS) backbone modification
  modified_base order(1,3,5,7,9,10,11,13,15,17,19): mod_base = OTHER; note = 2'-fluoro
  modified_base order(2,4,6,8,12,14,16,18): mod_base = OTHER; note = 2'-O-methyl
  source 1..19: mol_type = other RNA
tgaagagaggcatgttgga

SEQ ID NO: 41 - RNA, 21 nt, synthetic construct
  modified_base 20..21: mod_base = OTHER; note = thymine
  misc_feature 1..21: note = Synthetic oligonucleotide
  modified_base order(1,2,3,19,20,21): mod_base = OTHER; note = phosphorothioate (PS) backbone modification
  modified_base order(2,4,6,8,10,12,14,16,18): mod_base = OTHER; note = 2'-fluoro
  modified_base order(1,3,5,7,9,11,13,15,17,19): mod_base = OTHER; note = 2'-O-methyl
  source 1..21: mol_type = other RNA
tccaacatgcctctcttcatt

SEQ ID NO: 42 - RNA, 18 nt, synthetic construct
  misc_feature 1..18: note = Synthetic oligonucleotide
  modified_base order(1,2,3,16,17,18): mod_base = OTHER; note = phosphorothioate (PS) backbone modification
  modified_base order(2,4,6,8,9,10,11,12,14,16,18): mod_base = OTHER; note = 2'-fluoro
  modified_base order(1,3,5,7,13,15,17): mod_base = OTHER; note = 2'-O-methyl
  source 1..18: mol_type = other RNA
gaagagaggcatgttgga

SEQ ID NO: 43 - RNA, 20 nt, synthetic construct
  misc_feature 1..20: note = Synthetic oligonucleotide
  modified_base order(1,2,3,13,14,15,16,17,18,19,20): mod_base = OTHER; note = phosphorothioate (PS) backbone modification
  modified_base order(2,4,6,8,10,12,14,16,18,20): mod_base = OTHER; note = 2'-fluoro
  modified_base order(1,3,5,7,9,11,13,15,17,19): mod_base = OTHER; note = 2'-O-methyl
  source 1..20: mol_type = other RNA
tccaacatgcctctcttcat

SEQ ID NO: 44 - RNA, 15 nt, synthetic construct
  misc_feature 1..15: note = Synthetic oligonucleotide
  modified_base order(1,2,3,13,14,15): mod_base = OTHER; note = phosphorothioate (PS) backbone modification
  modified_base order(1,3,5,7,9,11,13,15): mod_base = OTHER; note = 2'-fluoro
  modified_base order(2,4,6,8,10,12,14): mod_base = OTHER; note = 2'-O-methyl
  source 1..15: mol_type = other RNA
gagaggcatgttgga

SEQ ID NO: 45 - RNA, 20 nt, synthetic construct
  misc_feature 1..20: note = Synthetic oligonucleotide
  modified_base order(1,2,3,13,14,15,16,17,18,19,20): mod_base = OTHER; note = phosphorothioate (PS) backbone modification
  modified_base order(2,4,6,8,10,12,14,16,18,20): mod_base = OTHER; note = 2'-fluoro
  modified_base order(1,3,5,7,9,11,13,15,17,19): mod_base = OTHER; note = 2'-O-methyl
  source 1..20: mol_type = other RNA
tccaacatgcctctcttcat

SEQ ID NO: 46 - RNA, 19 nt, synthetic construct
  misc_feature 1..19: note = Synthetic oligonucleotide
  modified_base order(1,2,3,16,17,18,19): mod_base = OTHER; note = phosphorothioate (PS) backbone modification
  modified_base order(1,3,5,7,9,10,11,13,15,17,19): mod_base = OTHER; note = 2'-fluoro
  modified_base order(2,4,6,8,12,14,16,18): mod_base = OTHER; note = 2'-O-methyl
  source 1..19: mol_type = other RNA
ggtggaaatgaagaaagta

SEQ ID NO: 47 - RNA, 21 nt, synthetic construct
  misc_feature 1..21: note = Synthetic oligonucleotide
  modified_base order(1,2,3,19,20,21): mod_base = OTHER; note = phosphorothioate (PS) backbone modification
  modified_base order(2,4,6,8,10,12,14,16,18,20): mod_base = OTHER; note = 2'-fluoro
  modified_base order(1,3,5,7,9,11,13,15,17,19,21): mod_base = OTHER; note = 2'-O-methyl
  source 1..21: mol_type = other RNA
tactttcttcatttccacctt

SEQ ID NO: 48 - RNA, 21 nt, synthetic construct
  misc_feature 1..21: note = Synthetic oligonucleotide
  modified_base order(1,2,3,19,20,21): mod_base = OTHER; note = phosphorothioate (PS) backbone modification
  modified_base order(2,4,6,8,10,12,14,16,18,20): mod_base = OTHER; note = 2'-fluoro
  modified_base order(1,3,5,7,9,11,13,15,17,19,21): mod_base = OTHER; note = 2'-O-methyl
  source 1..21: mol_type = other RNA
tttgtactacacaaaagtact

SEQ ID NO: 49 - RNA, 21 nt, synthetic construct
  modified_base 20..21: mod_base = OTHER; note = thymine
  misc_feature 1..21: note = Synthetic oligonucleotide
  modified_base order(1,2,3,19,20,21): mod_base = OTHER; note = phosphorothioate (PS) backbone modification
  modified_base order(2,4,6,8,10,12,14,16,18): mod_base = OTHER; note = 2'-fluoro
  modified_base order(1,3,5,7,9,11,13,15,17,19): mod_base = OTHER; note = 2'-O-methyl
  source 1..21: mol_type = other RNA
tactttcttcatttccacctt

SEQ ID NO: 50 - RNA, 18 nt, synthetic construct
  misc_feature 1..18: note = Synthetic oligonucleotide
  modified_base order(1,2,3,16,17,18): mod_base = OTHER; note = phosphorothioate (PS) backbone modification
  modified_base order(2,4,6,8,9,10,11,12,14,16,18): mod_base = OTHER; note = 2'-fluoro
  modified_base order(1,3,5,7,13,15,17): mod_base = OTHER; note = 2'-O-methyl
  source 1..18: mol_type = other RNA
gtggaaatgaagaaagta

SEQ ID NO: 51 - RNA, 20 nt, synthetic construct
  misc_feature 1..20: note = Synthetic oligonucleotide
  modified_base order(1,2,3,13,14,15,16,17,18,19,20): mod_base = OTHER; note = phosphorothioate (PS) backbone modification
  modified_base order(2,4,6,8,10,12,14,16,18,20): mod_base = OTHER; note = 2'-fluoro
  modified_base order(1,3,5,7,9,11,13,15,17,19): mod_base = OTHER; note = 2'-O-methyl
  source 1..20: mol_type = other RNA
tactttcttcatttccacct

SEQ ID NO: 52 - RNA, 15 nt, synthetic construct
  misc_feature 1..15: note = Synthetic oligonucleotide
  modified_base order(1,2,3,13,14,15): mod_base = OTHER; note = phosphorothioate (PS) backbone modification
  modified_base order(1,3,5,7,9,11,13,15): mod_base = OTHER; note = 2'-fluoro
  modified_base order(2,4,6,8,10,12,14): mod_base = OTHER; note = 2'-O-methyl
  source 1..15: mol_type = other RNA
gaaatgaagaaagta

SEQ ID NO: 53 - RNA, 20 nt, synthetic construct
  misc_feature 1..20: note = Synthetic oligonucleotide
  modified_base order(1,2,3,13,14,15,16,17,18,19,20): mod_base = OTHER; note = phosphorothioate (PS) backbone modification
  modified_base order(2,4,6,8,10,12,14,16,18,20): mod_base = OTHER; note = 2'-fluoro
  modified_base order(1,3,5,7,9,11,13,15,17,19): mod_base = OTHER; note = 2'-O-methyl
  source 1..20: mol_type = other RNA
tactttcttcatttccacct

SEQ ID NO: 54 - RNA, 19 nt, synthetic construct
  misc_feature 1..19: note = Synthetic oligonucleotide
  modified_base order(1,2,3,16,17,18,19): mod_base = OTHER; note = phosphorothioate (PS) backbone modification
  modified_base order(1,3,5,7,9,10,11,13,15,17,19): mod_base = OTHER; note = 2'-fluoro
  modified_base order(2,4,6,8,12,14,16,18): mod_base = OTHER; note = 2'-O-methyl
  modified_base 19: mod_base = OTHER; note = spacer-18 (S18 linker (1,1-bis(4-methoxyphenyl)-1-phenyl-2,5,8,11,14,17-hexaoxano nadecan-19-yl (2-cyanoethyl) diisopropylphosphoramidite)
  source 1..19: mol_type = other RNA
ggtggaaatgaagaaagta

SEQ ID NO: 55 - DNA, 21 bp, synthetic construct
  misc_feature 1..21: note = Synthetic oligonucleotide
  source 1..21: mol_type = other DNA
catcagccctaatccatctga

SEQ ID NO: 56 - RNA, 20 nt, synthetic construct
  misc_feature 1..20: note = Synthetic oligonucleotide
  modified_base order(1,2,3,16,17,18,19): mod_base = OTHER; note = phosphorothioate (PS) backbone modification
  modified_base order(1,3,5,7,9,10,11,13,15,17,19): mod_base = OTHER; note = 2'-fluoro
  modified_base order(2,4,6,8,12,14,16,18): mod_base = OTHER; note = 2'-O-methyl
  modified_base 19: mod_base = OTHER; note = Quasar570
  source 1..20: mol_type = other RNA
ggtggaaatgaagaaagtat

SEQ ID NO: 57 - RNA, 21 nt, synthetic construct
  misc_feature 1..21: note = Synthetic oligonucleotide
  modified_base order(1,2,3,19,20,21): mod_base = OTHER; note = phosphorothioate (PS) backbone modification
  modified_base order(2,4,6,8,10,12,14,16,18,20): mod_base = OTHER; note = 2'-fluoro
  modified_base order(1,3,5,7,9,11,13,15,17,19,21): mod_base = OTHER; note = 2'-O-methyl
  modified_base 1: mod_base = OTHER; note = 5'-(E)-vinylphosphonate
  source 1..21: mol_type = other RNA
tactttcttcatttccacctt

SEQ ID NO: 58 - RNA, 42 nt, synthetic construct
  misc_feature 1..42: note = Synthetic oligonucleotide
  modified_base order(2,3,4,18,19,20,21,22,23,24,25,26,27,28,29,30,31,32,33,34,35,36,37,38,39,40,41,42): mod_base = OTHER; note = phosphorothioate (PS) backbone modification
  modified_base order(2,4,6,8,10,11,12,14,16,18,20): mod_base = OTHER; note = 2'-fluoro
  modified_base order(3,5,7,9,13,15,17,19): mod_base = OTHER; note = 2'-O-methyl
  modified_base 20: mod_base = OTHER; note = spacer-18 (S18 linker (1,1-bis(4-methoxyphenyl)-1-phenyl-2,5,8,11,14,17-hexaoxano nadecan-19-yl (2-cyanoethyl) diisopropylphosphoramidite)
  modified_base 1: mod_base = OTHER; note = Quasar570
  source 1..42: mol_type = other RNA
tggtggaaatgaagaaagtatagactagatcatatgagtaga

SEQ ID NO: 59 - DNA, 353 bp, Homo sapiens
  misc_feature 1..353: note = Synthetic oligonucleotide
  source 1..353: mol_type = other DNA
acattcccttggatgtagtctgaggccccttaactcatctgttatcctgctagctgtagaaatgtatcctgataaacattaaacactgtaatcttaaaagtgtaattgtgtgactttttcagagttgctttaaagtacctgtagtgagaaactgatttatgatcacttggaagatttgtatagttttataaaactcagttaaaatgtctgtttcaatgacctgtattttgccagacttaaatcacagatgggtattaaacttgtcagaatttctttgtcattcaagcctgtgaataaaaaccctgtatggcacttattatgaggctattaaaagaatccaaattcaaactaaa

SEQ ID NO: 60 - RNA, 35 nt, synthetic construct
  misc_feature 1..35: note = Synthetic oligonucleotide
  modified_base order(2,3,4,18,19,20,21,22,23,24,25,26,27,28,29,30,31,32,33,34,35): mod_base = OTHER; note = phosphorothioate (PS) backbone modification
  modified_base order(2,4,6,8,10,11,12,14,16,18,20): mod_base = OTHER; note = 2'-fluoro
  modified_base order(3,5,7,9,13,15,17,19): mod_base = OTHER; note = 2'-O-methyl
  modified_base 20: mod_base = OTHER; note = spacer-18 (S18 linker (1,1-bis(4-methoxyphenyl)-1-phenyl-2,5,8,11,14,17-hexaoxano nadecan-19-yl (2-cyanoethyl) diisopropylphosphoramidite)
  modified_base 1: mod_base = OTHER; note = Quasar570
  source 1..35: mol_type = other RNA
tggtggaaatgaagaaagtatagactagatcatat

SEQ ID NO: 61 - DNA, 32 bp, Homo sapiens
  misc_feature 1..32: note = Synthetic oligonucleotide
  source 1..32: mol_type = other DNA
ccttggatgtagtctgaggccccttaactcat

SEQ ID NO: 62 - RNA, 32 nt, synthetic construct
  misc_feature 1..32: note = Synthetic oligonucleotide
  modified_base order(2,3,4,18,19,20,21,22,23,24,25,26,27,28,29,30,31,32): mod_base = OTHER; note = phosphorothioate (PS) backbone modification
  modified_base order(2,4,6,8,10,11,12,14,16,18,20): mod_base = OTHER; note = 2'-fluoro
  modified_base order(3,5,7,9,13,15,17,19): mod_base = OTHER; note = 2'-O-methyl
  modified_base 20: mod_base = OTHER; note = spacer-18 (S18 linker (1,1-bis(4-methoxyphenyl)-1-phenyl-2,5,8,11,14,17-hexaoxano nadecan-19-yl (2-cyanoethyl) diisopropylphosphoramidite)
  modified_base 1: mod_base = OTHER; note = Quasar570
  source 1..32: mol_type = other RNA
tggtggaaatgaagaaagtatagactagatca

SEQ ID NO: 63 - DNA, 31 bp, Homo sapiens
  misc_feature 1..31: note = Synthetic oligonucleotide
  source 1..31: mol_type = other DNA
ccccttaactcatctgttatcctgctagctg

SEQ ID NO: 64 - RNA, 26 nt, synthetic construct
  misc_feature 1..26: note = Synthetic oligonucleotide
  modified_base order(2,3,4,18,19,20,21,22,23,24,25,26): mod_base = OTHER; note = phosphorothioate (PS) backbone modification
  modified_base order(2,4,6,8,10,11,12,14,16,18,20): mod_base = OTHER; note = 2'-fluoro
  modified_base order(3,5,7,9,13,15,17,19): mod_base = OTHER; note = 2'-O-methyl
  modified_base 20: mod_base = OTHER; note = spacer-18 (S18 linker (1,1-bis(4-methoxyphenyl)-1-phenyl-2,5,8,11,14,17-hexaoxano nadecan-19-yl (2-cyanoethyl) diisopropylphosphoramidite)
  modified_base 1: mod_base = OTHER; note = Quasar570
  source 1..26: mol_type = other RNA
tggtggaaatgaagaaagtatagact

SEQ ID NO: 65 - DNA, 32 bp, Homo sapiens
  misc_feature 1..32: note = Synthetic oligonucleotide
  source 1..32: mol_type = other DNA
tggatgtagtctgaggccccttaactcatctg

SEQ ID NO: 66 - RNA, 18 nt, synthetic construct
  misc_feature 1..18: note = Synthetic oligonucleotide
  modified_base order(1,2,3,16,17,18): mod_base = OTHER; note = phosphorothioate (PS) backbone modification
  modified_base order(2,4,6,8,9,10,11,12,14,16,18): mod_base = OTHER; note = 2'-fluoro
  modified_base order(1,3,5,7,13,15,17): mod_base = OTHER; note = 2'-O-methyl
  source 1..18: mol_type = other RNA
gacgaggcctaagcaaca

SEQ ID NO: 67 - RNA, 20 nt, synthetic construct
  misc_feature 1..20: note = Synthetic oligonucleotide
  modified_base order(1,2,3,13,14,15,16,17,18,19,20): mod_base = OTHER; note = phosphorothioate (PS) backbone modification
  modified_base order(2,4,6,8,10,12,14,16,18,20): mod_base = OTHER; note = 2'-fluoro
  modified_base order(1,3,5,7,9,11,13,15,17,19): mod_base = OTHER; note = 2'-O-methyl
  modified_base 1: mod_base = OTHER; note = 5'-(E)-vinylphosphonate
  source 1..20: mol_type = other RNA
tgttgcttaggcctcgtctc

SEQ ID NO: 68 - RNA, 36 nt, synthetic construct
  misc_feature 1..36: note = Synthetic oligonucleotide
  modified_base order(1,2,3,16,17,18,19,20,21,22,23,24,25,26,27,28,29,30,31,32,33,34,35,36): mod_base = OTHER; note = phosphorothioate (PS) backbone modification
  modified_base order(2,4,6,8,9,10,11,12,14,16,18): mod_base = OTHER; note = 2'-fluoro
  modified_base order(1,3,5,7,13,15,17): mod_base = OTHER; note = 2'-O-methyl
  modified_base order(19,20,21,22,23,24,25,26,27,28,29,30,31,32,33,34,35,36): mod_base = OTHER; note = 2'-O-methoxyethyl (2 MOE)
  modified_base order(23,29): mod_base = OTHER; note = 5-methyl cytosine
  modified_base order(19,24,28,31,33): mod_base = OTHER; note = 5-methyl uracil
  modified_base 18: mod_base = OTHER; note = spacer-18 (S18 linker (1,1-bis(4-methoxyphenyl)-1-phenyl-2,5,8,11,14,17-hexaoxano nadecan-19-yl (2-cyanoethyl) diisopropylphosphoramidite)
  source 1..36: mol_type = other RNA
gacgaggcctaagcaacatagactagatcatatgag

SEQ ID NO: 69 - RNA, 19 nt, synthetic construct
  misc_feature 1..19: note = Synthetic oligonucleotide
  source 1..19: mol_type = other RNA
agggcatcatcaatttcga

SEQ ID NO: 70 - RNA, 34 nt, synthetic construct
  misc_feature 1..34: note = Synthetic oligonucleotide
  modified_base order(1,2,3,16,17,18,19,20,21,22,23,24,25,26,27,28,29,30,31,32,33,34): mod_base = OTHER; note = phosphorothioate (PS) backbone modification
  modified_base order(2,4,6,8,9,10,11,12,14,16,18): mod_base = OTHER; note = 2'-fluoro
  modified_base order(1,3,5,7,13,15,17): mod_base = OTHER; note = 2'-O-methyl
  modified_base order(19,20,21,22,23,24,25,26,27,28,29,30,31,32,33,34): mod_base = OTHER; note = 2'-O-methoxyethyl (2 MOE)
  modified_base order(23,29): mod_base = OTHER; note = 5-methyl cytosine
  modified_base order(19,24,28,31,33): mod_base = OTHER; note = 5-methyl uracil
  modified_base 18: mod_base = OTHER; note = spacer-18 (S18 linker (1,1-bis(4-methoxyphenyl)-1-phenyl-2,5,8,11,14,17-hexaoxano nadecan-19-yl (2-cyanoethyl) diisopropylphosphoramidite)
  source 1..34: mol_type = other RNA
gacgaggcctaagcaacatagactagatcatatg

SEQ ID NO: 71 - RNA, 19 nt, synthetic construct
  misc_feature 1..19: note = Synthetic oligonucleotide
  source 1..19: mol_type = other RNA
tcgaaattgatgatgccct

SEQ ID NO: 72 - RNA, 33 nt, synthetic construct
  misc_feature 1..33: note = Synthetic oligonucleotide
  modified_base order(1,2,3,16,17,18,19,20,21,22,23,24,25,26,27,28,29,30,31,32,33): mod_base = OTHER; note = phosphorothioate (PS) backbone modification
  modified_base order(2,4,6,8,9,10,11,12,14,16,18): mod_base = OTHER; note = 2'-fluoro
  modified_base order(1,3,5,7,13,15,17): mod_base = OTHER; note = 2'-O-methyl
  modified_base order(19,20,21,22,23,24,25,26,27,28,29,30,31,32,33): mod_base = OTHER; note = 2'-O-methoxyethyl (2 MOE)
  modified_base order(23,29): mod_base = OTHER; note = 5-methyl cytosine
  modified_base order(19,24,28,31,33): mod_base = OTHER; note = 5-methyl uracil
  modified_base 18: mod_base = OTHER; note = spacer-18 (S18 linker (1,1-bis(4-methoxyphenyl)-1-phenyl-2,5,8,11,14,17-hexaoxano nadecan-19-yl (2-cyanoethyl) diisopropylphosphoramidite)
  source 1..33: mol_type = other RNA
gacgaggcctaagcaacatagactagatcatat

SEQ ID NO: 73 - RNA, 19 nt, synthetic construct
  misc_feature 1..19: note = Synthetic oligonucleotide
  source 1..19: mol_type = other RNA
gcagggcatcatcaatttc

SEQ ID NO: 74 - RNA, 32 nt, synthetic construct
  misc_feature 1..32: note = Synthetic oligonucleotide
  modified_base order(1,2,3,16,17,18,19,20,21,22,23,24,25,26,27,28,29,30,31,32): mod_base = OTHER; note = phosphorothioate (PS) backbone modification
  modified_base order(2,4,6,8,9,10,11,12,14,16,18): mod_base = OTHER; note = 2'-fluoro
  modified_base order(1,3,5,7,13,15,17): mod_base = OTHER; note = 2'-O-methyl
  modified_base order(19,20,21,22,23,24,25,26,27,28,29,30,31,32): mod_base = OTHER; note = 2'-O-methoxyethyl (2 MOE)
  modified_base order(23,29): mod_base = OTHER; note = 5-methyl cytosine
  modified_base order(19,24,28,31): mod_base = OTHER; note = 5-methyl uracil
  modified_base 18: mod_base = OTHER; note = spacer-18 (S18 linker (1,1-bis(4-methoxyphenyl)-1-phenyl-2,5,8,11,14,17-hexaoxano nadecan-19-yl (2-cyanoethyl) diisopropylphosphoramidite)
  source 1..32: mol_type = other RNA
gacgaggcctaagcaacatagactagatcata

SEQ ID NO: 75 - RNA, 19 nt, synthetic construct
  misc_feature 1..19: note = Synthetic oligonucleotide
  source 1..19: mol_type = other RNA
gaaattgatgatgccctgc

SEQ ID NO: 76 - RNA, 31 nt, synthetic construct
  misc_feature 1..31: note = Synthetic oligonucleotide
  modified_base order(1,2,3,16,17,18,19,20,21,22,23,24,25,26,27,28,29,30,31): mod_base = OTHER; note = phosphorothioate (PS) backbone modification
  modified_base order(2,4,6,8,9,10,11,12,14,16,18): mod_base = OTHER; note = 2'-fluoro
  modified_base order(1,3,5,7,13,15,17): mod_base = OTHER; note = 2'-O-methyl
  modified_base order(19,20,21,22,23,24,25,26,27,28,29,30,31): mod_base = OTHER; note = 2'-O-methoxyethyl (2 MOE)
  modified_base order(23,29): mod_base = OTHER; note = 5-methyl cytosine
  modified_base order(19,24,28,31): mod_base = OTHER; note = 5-methyl uracil
  modified_base 18: mod_base = OTHER; note = spacer-18 (S18 linker (1,1-bis(4-methoxyphenyl)-1-phenyl-2,5,8,11,14,17-hexaoxano nadecan-19-yl (2-cyanoethyl) diisopropylphosphoramidite)
  source 1..31: mol_type = other RNA
gacgaggcctaagcaacatagactagatcat

SEQ ID NO: 77 - RNA, 19 nt, synthetic construct
  misc_feature 1..19: note = Synthetic oligonucleotide
  source 1..19: mol_type = other RNA
ccagtgcagggcatcatca

SEQ ID NO: 78 - RNA, 30 nt, synthetic construct
  misc_feature 1..30: note = Synthetic oligonucleotide
  modified_base order(1,2,3,16,17,18,19,20,21,22,23,24,25,26,27,28,29,30): mod_base = OTHER; note = phosphorothioate (PS) backbone modification
  modified_base order(2,4,6,8,9,10,11,12,14,16,18): mod_base = OTHER; note = 2'-fluoro
  modified_base order(1,3,5,7,13,15,17): mod_base = OTHER; note = 2'-O-methyl
  modified_base order(19,20,21,22,23,24,25,26,27,28,29,30): mod_base = OTHER; note = 2'-O-methoxyethyl (2 MOE)
  modified_base order(23,29): mod_base = OTHER; note = 5-methyl cytosine
  modified_base order(19,24,28): mod_base = OTHER; note = 5-methyl uracil
  modified_base 18: mod_base = OTHER; note = spacer-18 (S18 linker (1,1-bis(4-methoxyphenyl)-1-phenyl-2,5,8,11,14,17-hexaoxano nadecan-19-yl (2-cyanoethyl) diisopropylphosphoramidite)
  source 1..30: mol_type = other RNA
gacgaggcctaagcaacatagactagatca

SEQ ID NO: 79 - RNA, 19 nt, synthetic construct
  misc_feature 1..19: note = Synthetic oligonucleotide
  source 1..19: mol_type = other RNA
tgatgatgccctgcactgg

SEQ ID NO: 80 - RNA, 29 nt, synthetic construct
  misc_feature 1..29: note = Synthetic oligonucleotide
  modified_base order(1,2,3,16,17,18,19,20,21,22,23,24,25,26,27,28,29): mod_base = OTHER; note = phosphorothioate (PS) backbone modification
  modified_base order(2,4,6,8,9,10,11,12,14,16,18): mod_base = OTHER; note = 2'-fluoro
  modified_base order(1,3,5,7,13,15,17): mod_base = OTHER; note = 2'-O-methyl
  modified_base order(19,20,21,22,23,24,25,26,27,28,29): mod_base = OTHER; note = 2'-O-methoxyethyl (2 MOE)
  modified_base order(23,29): mod_base = OTHER; note = 5-methyl cytosine
  modified_base order(19,24,28): mod_base = OTHER; note = 5-methyl uracil
  modified_base 18: mod_base = OTHER; note = spacer-18 (S18 linker (1,1-bis(4-methoxyphenyl)-1-phenyl-2,5,8,11,14,17-hexaoxano nadecan-19-yl (2-cyanoethyl) diisopropylphosphoramidite)
  source 1..29: mol_type = other RNA
gacgaggcctaagcaacatagactagatc

SEQ ID NO: 81 - RNA, 19 nt, synthetic construct
  misc_feature 1..19: note = Synthetic oligonucleotide
  source 1..19: mol_type = other RNA
atcatcaatttcgagcaga

SEQ ID NO: 82 - RNA, 28 nt, synthetic construct
  misc_feature 1..28: note = Synthetic oligonucleotide
  modified_base order(1,2,3,16,17,18,19,20,21,22,23,24,25,26,27,28): mod_base = OTHER; note = phosphorothioate (PS) backbone modification
  modified_base order(2,4,6,8,9,10,11,12,14,16,18): mod_base = OTHER; note = 2'-fluoro
  modified_base order(1,3,5,7,13,15,17): mod_base = OTHER; note = 2'-O-methyl
  modified_base order(19,20,21,22,23,24,25,26,27,28): mod_base = OTHER; note = 2'-O-methoxyethyl (2 MOE)
  modified_base 23: mod_base = OTHER; note = 5-methyl cytosine
  modified_base order(19,24,28): mod_base = OTHER; note = 5-methyl uracil
  modified_base 18: mod_base = OTHER; note = spacer-18 (S18 linker (1,1-bis(4-methoxyphenyl)-1-phenyl-2,5,8,11,14,17-hexaoxano nadecan-19-yl (2-cyanoethyl) diisopropylphosphoramidite)
  source 1..28: mol_type = other RNA
gacgaggcctaagcaacatagactagat

SEQ ID NO: 83 - RNA, 19 nt, synthetic construct
  misc_feature 1..19: note = Synthetic oligonucleotide
  source 1..19: mol_type = other RNA
tctgctcgaaattgatgat

SEQ ID NO: 84 - RNA, 27 nt, synthetic construct
  misc_feature 1..27: note = Synthetic oligonucleotide
  modified_base order(1,2,3,16,17,18,19,20,21,22,23,24,25,26,27): mod_base = OTHER; note = phosphorothioate (PS) backbone modification
  modified_base order(2,4,6,8,9,10,11,12,14,16,18): mod_base = OTHER; note = 2'-fluoro
  modified_base order(1,3,5,7,13,15,17): mod_base = OTHER; note = 2'-O-methyl
  modified_base order(19,20,21,22,23,24,25,26,27): mod_base = OTHER; note = 2'-O-methoxyethyl (2 MOE)
  modified_base 23: mod_base = OTHER; note = 5-methyl cytosine
  modified_base order(19,24): mod_base = OTHER; note = 5-methyl uracil
  modified_base 18: mod_base = OTHER; note = spacer-18 (S18 linker (1,1-bis(4-methoxyphenyl)-1-phenyl-2,5,8,11,14,17-hexaoxano nadecan-19-yl (2-cyanoethyl) diisopropylphosphoramidite)
  source 1..27: mol_type = other RNA
gacgaggcctaagcaacatagactaga

SEQ ID NO: 85 - RNA, 19 nt, synthetic construct
  misc_feature 1..19: note = Synthetic oligonucleotide
  source 1..19: mol_type = other RNA
cagggcatcatcaatttcg

SEQ ID NO: 86 - RNA, 26 nt, synthetic construct
  misc_feature 1..26: note = Synthetic oligonucleotide
  modified_base order(1,2,3,16,17,18,19,20,21,22,23,24,25,26): mod_base = OTHER; note = phosphorothioate (PS) backbone modification
  modified_base order(2,4,6,8,9,10,11,12,14,16,18): mod_base = OTHER; note = 2'-fluoro
  modified_base order(1,3,5,7,13,15,17): mod_base = OTHER; note = 2'-O-methyl
  modified_base order(19,20,21,22,23,24,25,26): mod_base = OTHER; note = 2'-O-methoxyethyl (2 MOE)
  modified_base 23: mod_base = OTHER; note = 5-methyl cytosine
  modified_base order(19,24): mod_base = OTHER; note = 5-methyl uracil
  modified_base 18: mod_base = OTHER; note = spacer-18 (S18 linker (1,1-bis(4-methoxyphenyl)-1-phenyl-2,5,8,11,14,17-hexaoxano nadecan-19-yl (2-cyanoethyl) diisopropylphosphoramidite)
  source 1..26: mol_type = other RNA
gacgaggcctaagcaacatagactag

SEQ ID NO: 87 - RNA, 19 nt, synthetic construct
  misc_feature 1..19: note = Synthetic oligonucleotide
  source 1..19: mol_type = other RNA
cgaaattgatgatgccctg

SEQ ID NO: 88 - DNA, 19 bp, synthetic construct
  misc_feature 1..19: note = Synthetic oligonucleotide
  source 1..19: mol_type = other DNA
cgacgaaggccgtgtgcgt

SEQ ID NO: 89 - DNA, 19 bp, synthetic construct
  misc_feature 1..19: note = Synthetic oligonucleotide
  source 1..19: mol_type = other DNA
cgaaggccgtgtgcgtgct

SEQ ID NO: 90 - DNA, 19 bp, synthetic construct
  misc_feature 1..19: note = Synthetic oligonucleotide
  source 1..19: mol_type = other DNA
aaggccgtgtgcgtgctga

SEQ ID NO: 91 - DNA, 19 bp, synthetic construct
  misc_feature 1..19: note = Synthetic oligonucleotide
  source 1..19: mol_type = other DNA
aggccgtgtgcgtgctgaa

SEQ ID NO: 92 - DNA, 19 bp, synthetic construct
  misc_feature 1..19: note = Synthetic oligonucleotide
  source 1..19: mol_type = other DNA
tgtgcgtgctgaagggcga

SEQ ID NO: 93 - DNA, 19 bp, synthetic construct
  misc_feature 1..19: note = Synthetic oligonucleotide
  source 1..19: mol_type = other DNA
acggcccagtgcagggcat

SEQ ID NO: 94 - DNA, 19 bp, synthetic construct
  misc_feature 1..19: note = Synthetic oligonucleotide
  source 1..19: mol_type = other DNA
ggcccagtgcagggcatca

SEQ ID NO: 95 - DNA, 19 bp, synthetic construct
  misc_feature 1..19: note = Synthetic oligonucleotide
  source 1..19: mol_type = other DNA
gcccagtgcagggcatcat

SEQ ID NO: 96 - DNA, 19 bp, synthetic construct
  misc_feature 1..19: note = Synthetic oligonucleotide
  source 1..19: mol_type = other DNA
ccagtgcagggcatcatca

SEQ ID NO: 97 - DNA, 19 bp, synthetic construct
  misc_feature 1..19: note = Synthetic oligonucleotide
  source 1..19: mol_type = other DNA
cagtgcagggcatcatcaa

SEQ ID NO: 98 - DNA, 19 bp, synthetic construct
  misc_feature 1..19: note = Synthetic oligonucleotide
  source 1..19: mol_type = other DNA
agtgcagggcatcatcaat

SEQ ID NO: 99 - DNA, 19 bp, synthetic construct
  misc_feature 1..19: note = Synthetic oligonucleotide
  source 1..19: mol_type = other DNA
gtgcagggcatcatcaatt

SEQ ID NO: 100 - DNA, 19 bp, synthetic construct
  misc_feature 1..19: note = Synthetic oligonucleotide
  source 1..19: mol_type = other DNA
tgcagggcatcatcaattt

SEQ ID NO: 101 - DNA, 19 bp, synthetic construct
  misc_feature 1..19: note = Synthetic oligonucleotide
  source 1..19: mol_type = other DNA
gcagggcatcatcaatttc

SEQ ID NO: 102 - DNA, 19 bp, synthetic construct
  misc_feature 1..19: note = Synthetic oligonucleotide
  source 1..19: mol_type = other DNA
cagggcatcatcaatttcg

SEQ ID NO: 103 - DNA, 19 bp, synthetic construct
  misc_feature 1..19: note = Synthetic oligonucleotide
  source 1..19: mol_type = other DNA
agggcatcatcaatttcga

SEQ ID NO: 104 - DNA, 19 bp, synthetic construct
  misc_feature 1..19: note = Synthetic oligonucleotide
  source 1..19: mol_type = other DNA
gcatcatcaatttcgagca

SEQ ID NO: 105 - DNA, 19 bp, synthetic construct
  misc_feature 1..19: note = Synthetic oligonucleotide
  source 1..19: mol_type = other DNA
catcatcaatttcgagcag

SEQ ID NO: 106 - DNA, 19 bp, synthetic construct
  misc_feature 1..19: note = Synthetic oligonucleotide
  source 1..19: mol_type = other DNA
atcatcaatttcgagcaga

SEQ ID NO: 107 - DNA, 19 bp, synthetic construct
  misc_feature 1..19: note = Synthetic oligonucleotide
  source 1..19: mol_type = other DNA
tcatcaatttcgagcagaa

SEQ ID NO: 108 - DNA, 19 bp, synthetic construct
  misc_feature 1..19: note = Synthetic oligonucleotide
  source 1..19: mol_type = other DNA
tcaatttcgagcagaagga

SEQ ID NO: 109 - DNA, 19 bp, synthetic construct
  misc_feature 1..19: note = Synthetic oligonucleotide
  source 1..19: mol_type = other DNA
caatttcgagcagaaggaa

SEQ ID NO: 110 - DNA, 19 bp, synthetic construct
  misc_feature 1..19: note = Synthetic oligonucleotide
  source 1..19: mol_type = other DNA
aatttcgagcagaaggaaa

SEQ ID NO: 111 - DNA, 19 bp, synthetic construct
  misc_feature 1..19: note = Synthetic oligonucleotide
  source 1..19: mol_type = other DNA
atttcgagcagaaggaaag

SEQ ID NO: 112 - DNA, 19 bp, synthetic construct
  misc_feature 1..19: note = Synthetic oligonucleotide
  source 1..19: mol_type = other DNA
tttcgagcagaaggaaagt

SEQ ID NO: 113 - DNA, 19 bp, synthetic construct
  misc_feature 1..19: note = Synthetic oligonucleotide
  source 1..19: mol_type = other DNA
ttcgagcagaaggaaagta

SEQ ID NO: 114 - DNA, 19 bp, synthetic construct
  misc_feature 1..19: note = Synthetic oligonucleotide
  source 1..19: mol_type = other DNA
tcgagcagaaggaaagtaa

SEQ ID NO: 115 - DNA, 19 bp, synthetic construct
  misc_feature 1..19: note = Synthetic oligonucleotide
  source 1..19: mol_type = other DNA
cgagcagaaggaaagtaat

SEQ ID NO: 116 - DNA, 19 bp, synthetic construct
  misc_feature 1..19: note = Synthetic oligonucleotide
  source 1..19: mol_type = other DNA
gagcagaaggaaagtaatg

SEQ ID NO: 117 - DNA, 19 bp, synthetic construct
  misc_feature 1..19: note = Synthetic oligonucleotide
  source 1..19: mol_type = other DNA
gcagaaggaaagtaatgga

SEQ ID NO: 118 - DNA, 19 bp, synthetic construct
  misc_feature 1..19: note = Synthetic oligonucleotide
  source 1..19: mol_type = other DNA
gaaggaaagtaatggacca

SEQ ID NO: 119 - DNA, 19 bp, synthetic construct
  misc_feature 1..19: note = Synthetic oligonucleotide
  source 1..19: mol_type = other DNA
ggaaagtaatggaccagtg

SEQ ID NO: 120 - DNA, 19 bp, synthetic construct
  misc_feature 1..19: note = Synthetic oligonucleotide
  source 1..19: mol_type = other DNA
gaaagtaatggaccagtga

SEQ ID NO: 121 - DNA, 19 bp, synthetic construct
  misc_feature 1..19: note = Synthetic oligonucleotide
  source 1..19: mol_type = other DNA
aaagtaatggaccagtgaa

SEQ ID NO: 122 - DNA, 19 bp, synthetic construct
  misc_feature 1..19: note = Synthetic oligonucleotide
  source 1..19: mol_type = other DNA
aagtaatggaccagtgaag

SEQ ID NO: 123 - DNA, 19 bp, synthetic construct
  misc_feature 1..19: note = Synthetic oligonucleotide
  source 1..19: mol_type = other DNA
gtaatggaccagtgaaggt

SEQ ID NO: 124 - DNA, 19 bp, synthetic construct
  misc_feature 1..19: note = Synthetic oligonucleotide
  source 1..19: mol_type = other DNA
aatggaccagtgaaggtgt

SEQ ID NO: 125 - DNA, 19 bp, synthetic construct
  misc_feature 1..19: note = Synthetic oligonucleotide
  source 1..19: mol_type = other DNA
atggaccagtgaaggtgtg

SEQ ID NO: 126 - DNA, 19 bp, synthetic construct
  misc_feature 1..19: note = Synthetic oligonucleotide
  source 1..19: mol_type = other DNA
ccagtgaaggtgtggggaa

SEQ ID NO: 127 - DNA, 19 bp, synthetic construct
  misc_feature 1..19: note = Synthetic oligonucleotide
  source 1..19: mol_type = other DNA
gtgaaggtgtggggaagca

SEQ ID NO: 128 - DNA, 19 bp, synthetic construct
  misc_feature 1..19: note = Synthetic oligonucleotide
  source 1..19: mol_type = other DNA
tgaaggtgtggggaagcat

SEQ ID NO: 129 - DNA, 19 bp, synthetic construct
  misc_feature 1..19: note = Synthetic oligonucleotide
  source 1..19: mol_type = other DNA
gaaggtgtggggaagcatt

SEQ ID NO: 130 - DNA, 19 bp, synthetic construct
  misc_feature 1..19: note = Synthetic oligonucleotide
  source 1..19: mol_type = other DNA
aaggtgtggggaagcatta

SEQ ID NO: 131 - DNA, 19 bp, synthetic construct
  misc_feature 1..19: note = Synthetic oligonucleotide
  source 1..19: mol_type = other DNA
aggtgtggggaagcattaa

SEQ ID NO: 132 - DNA, 19 bp, synthetic construct
  misc_feature 1..19: note = Synthetic oligonucleotide
  source 1..19: mol_type = other DNA
ggtgtggggaagcattaaa

SEQ ID NO: 133 - DNA, 19 bp, synthetic construct
  misc_feature 1..19: note = Synthetic oligonucleotide
  source 1..19: mol_type = other DNA
gtgtggggaagcattaaag

SEQ ID NO: 134 - DNA, 19 bp, synthetic construct
  misc_feature 1..19: note = Synthetic oligonucleotide
  source 1..19: mol_type = other DNA
tgtggggaagcattaaagg

SEQ ID NO: 135 - DNA, 19 bp, synthetic construct
  misc_feature 1..19: note = Synthetic oligonucleotide
  source 1..19: mol_type = other DNA
gtggggaagcattaaagga

SEQ ID NO: 136 - DNA, 19 bp, synthetic construct
  misc_feature 1..19: note = Synthetic oligonucleotide
  source 1..19: mol_type = other DNA
ggggaagcattaaaggact

SEQ ID NO: 137 - DNA, 19 bp, synthetic construct
  misc_feature 1..19: note = Synthetic oligonucleotide
  source 1..19: mol_type = other DNA
gggaagcattaaaggactg

SEQ ID NO: 138 - DNA, 19 bp, synthetic construct
  misc_feature 1..19: note = Synthetic oligonucleotide
  source 1..19: mol_type = other DNA
ggaagcattaaaggactga

SEQ ID NO: 139 - DNA, 19 bp, synthetic construct
  misc_feature 1..19: note = Synthetic oligonucleotide
  source 1..19: mol_type = other DNA
aagcattaaaggactgact

SEQ ID NO: 140 - DNA, 19 bp, synthetic construct
  misc_feature 1..19: note = Synthetic oligonucleotide
  source 1..19: mol_type = other DNA
gcattaaaggactgactga

SEQ ID NO: 141 - DNA, 19 bp, synthetic construct
  misc_feature 1..19: note = Synthetic oligonucleotide
  source 1..19: mol_type = other DNA
cattaaaggactgactgaa

SEQ ID NO: 142 - DNA, 19 bp, synthetic construct
  misc_feature 1..19: note = Synthetic oligonucleotide
  source 1..19: mol_type = other DNA
attaaaggactgactgaag

SEQ ID NO: 143 - DNA, 19 bp, synthetic construct
  misc_feature 1..19: note = Synthetic oligonucleotide
  source 1..19: mol_type = other DNA
ttaaaggactgactgaagg

SEQ ID NO: 144 - DNA, 19 bp, synthetic construct
  misc_feature 1..19: note = Synthetic oligonucleotide
  source 1..19: mol_type = other DNA
taaaggactgactgaaggc

SEQ ID NO: 145 - DNA, 19 bp, synthetic construct
  misc_feature 1..19: note = Synthetic oligonucleotide
  source 1..19: mol_type = other DNA
actgactgaaggcctgcat

SEQ ID NO: 146 - DNA, 19 bp, synthetic construct
  misc_feature 1..19: note = Synthetic oligonucleotide
  source 1..19: mol_type = other DNA
gactgaaggcctgcatgga

SEQ ID NO: 147 - DNA, 19 bp, synthetic construct
  misc_feature 1..19: note = Synthetic oligonucleotide
  source 1..19: mol_type = other DNA
actgaaggcctgcatggat

SEQ ID NO: 148 - DNA, 19 bp, synthetic construct
  misc_feature 1..19: note = Synthetic oligonucleotide
  source 1..19: mol_type = other DNA
ctgaaggcctgcatggatt

SEQ ID NO: 149 - DNA, 19 bp, synthetic construct
  misc_feature 1..19: note = Synthetic oligonucleotide
  source 1..19: mol_type = other DNA
tgaaggcctgcatggattc

SEQ ID NO: 150 - DNA, 19 bp, synthetic construct
  misc_feature 1..19: note = Synthetic oligonucleotide
  source 1..19: mol_type = other DNA
aaggcctgcatggattcca

SEQ ID NO: 151 - DNA, 19 bp, synthetic construct
  misc_feature 1..19: note = Synthetic oligonucleotide
  source 1..19: mol_type = other DNA
aggcctgcatggattccat

SEQ ID NO: 152 - DNA, 19 bp, synthetic construct
  misc_feature 1..19: note = Synthetic oligonucleotide
  source 1..19: mol_type = other DNA
gcctgcatggattccatgt

SEQ ID NO: 153 - DNA, 19 bp, synthetic construct
  misc_feature 1..19: note = Synthetic oligonucleotide
  source 1..19: mol_type = other DNA
cctgcatggattccatgtt

SEQ ID NO: 154 - DNA, 19 bp, synthetic construct
  misc_feature 1..19: note = Synthetic oligonucleotide
  source 1..19: mol_type = other DNA
ctgcatggattccatgttc

SEQ ID NO: 155 - DNA, 19 bp, synthetic construct
  misc_feature 1..19: note = Synthetic oligonucleotide
  source 1..19: mol_type = other DNA
tgcatggattccatgttca

SEQ ID NO: 156 - DNA, 19 bp, synthetic construct
  misc_feature 1..19: note = Synthetic oligonucleotide
  source 1..19: mol_type = other DNA
gcatggattccatgttcat

SEQ ID NO: 157 - DNA, 19 bp, synthetic construct
  misc_feature 1..19: note = Synthetic oligonucleotide
  source 1..19: mol_type = other DNA
atggattccatgttcatga

SEQ ID NO: 158 - DNA, 19 bp, synthetic construct
  misc_feature 1..19: note = Synthetic oligonucleotide
  source 1..19: mol_type = other DNA
tggattccatgttcatgag

SEQ ID NO: 159 - DNA, 19 bp, synthetic construct
  misc_feature 1..19: note = Synthetic oligonucleotide
  source 1..19: mol_type = other DNA
ggattccatgttcatgagt

SEQ ID NO: 160 - DNA, 19 bp, synthetic construct
  misc_feature 1..19: note = Synthetic oligonucleotide
  source 1..19: mol_type = other DNA
gattccatgttcatgagtt

SEQ ID NO: 161 - DNA, 19 bp, synthetic construct
  misc_feature 1..19: note = Synthetic oligonucleotide
  source 1..19: mol_type = other DNA
tccatgttcatgagtttgg

SEQ ID NO: 162 - DNA, 19 bp, synthetic construct
  misc_feature 1..19: note = Synthetic oligonucleotide
  source 1..19: mol_type = other DNA
ccatgttcatgagtttgga

SEQ ID NO: 163 - DNA, 19 bp, synthetic construct
  misc_feature 1..19: note = Synthetic oligonucleotide
  source 1..19: mol_type = other DNA
atgttcatgagtttggaga

SEQ ID NO: 164 - DNA, 19 bp, synthetic construct
  misc_feature 1..19: note = Synthetic oligonucleotide
  source 1..19: mol_type = other DNA
tgttcatgagtttggagat

SEQ ID NO: 165 - DNA, 19 bp, synthetic construct
  misc_feature 1..19: note = Synthetic oligonucleotide
  source 1..19: mol_type = other DNA
gttcatgagtttggagata

SEQ ID NO: 166 - DNA, 19 bp, synthetic construct
  misc_feature 1..19: note = Synthetic oligonucleotide
  source 1..19: mol_type = other DNA
gagtttggagataatacag

SEQ ID NO: 167 - DNA, 19 bp, synthetic construct
  misc_feature 1..19: note = Synthetic oligonucleotide
  source 1..19: mol_type = other DNA
gtttggagataatacagca

SEQ ID NO: 168 - DNA, 19 bp, synthetic construct
  misc_feature 1..19: note = Synthetic oligonucleotide
  source 1..19: mol_type = other DNA
ggagataatacagcaggct

SEQ ID NO: 169 - DNA, 19 bp, synthetic construct
  misc_feature 1..19: note = Synthetic oligonucleotide
  source 1..19: mol_type = other DNA
agataatacagcaggctgt

SEQ ID NO: 170 - DNA, 19 bp, synthetic construct
  misc_feature 1..19: note = Synthetic oligonucleotide
  source 1..19: mol_type = other DNA
gataatacagcaggctgta

SEQ ID NO: 171 - DNA, 19 bp, synthetic construct
  misc_feature 1..19: note = Synthetic oligonucleotide
  source 1..19: mol_type = other DNA
ataatacagcaggctgtac

SEQ ID NO: 172 - DNA, 19 bp, synthetic construct
  misc_feature 1..19: note = Synthetic oligonucleotide
  source 1..19: mol_type = other DNA
taatacagcaggctgtacc

SEQ ID NO: 173 - DNA, 19 bp, synthetic construct
  misc_feature 1..19: note = Synthetic oligonucleotide
  source 1..19: mol_type = other DNA
aatacagcaggctgtacca

SEQ ID NO: 174 - DNA, 19 bp, synthetic construct
  misc_feature 1..19: note = Synthetic oligonucleotide
  source 1..19: mol_type = other DNA
tacagcaggctgtaccagt

SEQ ID NO: 175 - DNA, 19 bp, synthetic construct
  misc_feature 1..19: note = Synthetic oligonucleotide
  source 1..19: mol_type = other DNA
acagcaggctgtaccagtg

SEQ ID NO: 176 - DNA, 19 bp, synthetic construct
  misc_feature 1..19: note = Synthetic oligonucleotide
  source 1..19: mol_type = other DNA
agcaggctgtaccagtgca

SEQ ID NO: 177 - DNA, 19 bp, synthetic construct
  misc_feature 1..19: note = Synthetic oligonucleotide
  source 1..19: mol_type = other DNA
ctgtaccagtgcaggtcct

SEQ ID NO: 178 - DNA, 19 bp, synthetic construct
  misc_feature 1..19: note = Synthetic oligonucleotide
  source 1..19: mol_type = other DNA
gtaccagtgcaggtcctca

SEQ ID NO: 179 - DNA, 19 bp, synthetic construct
  misc_feature 1..19: note = Synthetic oligonucleotide
  source 1..19: mol_type = other DNA
accagtgcaggtcctcact

SEQ ID NO: 180 - DNA, 19 bp, synthetic construct
  misc_feature 1..19: note = Synthetic oligonucleotide
  source 1..19: mol_type = other DNA
ccagtgcaggtcctcactt

SEQ ID NO: 181 - DNA, 19 bp, synthetic construct
  misc_feature 1..19: note = Synthetic oligonucleotide
  source 1..19: mol_type = other DNA
cagtgcaggtcctcacttt

SEQ ID NO: 182 - DNA, 19 bp, synthetic construct
  misc_feature 1..19: note = Synthetic oligonucleotide
  source 1..19: mol_type = other DNA
agtgcaggtcctcacttta

SEQ ID NO: 183 - DNA, 19 bp, synthetic construct
  misc_feature 1..19: note = Synthetic oligonucleotide
  source 1..19: mol_type = other DNA
gtgcaggtcctcactttaa

SEQ ID NO: 184 - DNA, 19 bp, synthetic construct
  misc_feature 1..19: note = Synthetic oligonucleotide
  source 1..19: mol_type = other DNA
tgcaggtcctcactttaat

SEQ ID NO: 185 - DNA, 19 bp, synthetic construct
  misc_feature 1..19: note = Synthetic oligonucleotide
  source 1..19: mol_type = other DNA
gcaggtcctcactttaatc

SEQ ID NO: 186 - DNA, 19 bp, synthetic construct
  misc_feature 1..19: note = Synthetic oligonucleotide
  source 1..19: mol_type = other DNA
caggtcctcactttaatcc

SEQ ID NO: 187 - DNA, 19 bp, synthetic construct
  misc_feature 1..19: note = Synthetic oligonucleotide
  source 1..19: mol_type = other DNA
aggtcctcactttaatcct

SEQ ID NO: 188 - DNA, 19 bp, synthetic construct
  misc_feature 1..19: note = Synthetic oligonucleotide
  source 1..19: mol_type = other DNA
ggtcctcactttaatcctc

SEQ ID NO: 189 - DNA, 19 bp, synthetic construct
  misc_feature 1..19: note = Synthetic oligonucleotide
  source 1..19: mol_type = other DNA
gtcctcactttaatcctct

SEQ ID NO: 190 - DNA, 19 bp, synthetic construct
  misc_feature 1..19: note = Synthetic oligonucleotide
  source 1..19: mol_type = other DNA
tcctcactttaatcctcta

SEQ ID NO: 191 - DNA, 19 bp, synthetic construct
  misc_feature 1..19: note = Synthetic oligonucleotide
  source 1..19: mol_type = other DNA
cctcactttaatcctctat

SEQ ID NO: 192 - DNA, 19 bp, synthetic construct
  misc_feature 1..19: note = Synthetic oligonucleotide
  source 1..19: mol_type = other DNA
ctcactttaatcctctatc

SEQ ID NO: 193 - DNA, 19 bp, synthetic construct
  misc_feature 1..19: note = Synthetic oligonucleotide
  source 1..19: mol_type = other DNA
tcactttaatcctctatcc

SEQ ID NO: 194 - DNA, 19 bp, synthetic construct
  misc_feature 1..19: note = Synthetic oligonucleotide
  source 1..19: mol_type = other DNA
cactttaatcctctatcca

SEQ ID NO: 195 - DNA, 19 bp, synthetic construct
  misc_feature 1..19: note = Synthetic oligonucleotide
  source 1..19: mol_type = other DNA
ctttaatcctctatccaga

SEQ ID NO: 196 - DNA, 19 bp, synthetic construct
  misc_feature 1..19: note = Synthetic oligonucleotide
  source 1..19: mol_type = other DNA
aatcctctatccagaaaac

SEQ ID NO: 197 - DNA, 19 bp, synthetic construct
  misc_feature 1..19: note = Synthetic oligonucleotide
  source 1..19: mol_type = other DNA
atcctctatccagaaaaca

SEQ ID NO: 198 - DNA, 19 bp, synthetic construct
  misc_feature 1..19: note = Synthetic oligonucleotide
  source 1..19: mol_type = other DNA
tcctctatccagaaaacac

SEQ ID NO: 199 - DNA, 19 bp, synthetic construct
  misc_feature 1..19: note = Synthetic oligonucleotide
  source 1..19: mol_type = other DNA
tctatccagaaaacacggt

SEQ ID NO: 200 - DNA, 19 bp, synthetic construct
  misc_feature 1..19: note = Synthetic oligonucleotide
  source 1..19: mol_type = other DNA
agaaaacacggtgggccaa

SEQ ID NO: 201 - DNA, 19 bp, synthetic construct
  misc_feature 1..19: note = Synthetic oligonucleotide
  source 1..19: mol_type = other DNA
gaaaacacggtgggccaaa

SEQ ID NO: 202 - DNA, 19 bp, synthetic construct
  misc_feature 1..19: note = Synthetic oligonucleotide
  source 1..19: mol_type = other DNA
aaaacacggtgggccaaag

SEQ ID NO: 203 - DNA, 19 bp, synthetic construct
  misc_feature 1..19: note = Synthetic oligonucleotide
  source 1..19: mol_type = other DNA
aaacacggtgggccaaagg

SEQ ID NO: 204 - DNA, 19 bp, synthetic construct
  misc_feature 1..19: note = Synthetic oligonucleotide
  source 1..19: mol_type = other DNA
aacacggtgggccaaagga

SEQ ID NO: 205 - DNA, 19 bp, synthetic construct
  misc_feature 1..19: note = Synthetic oligonucleotide
  source 1..19: mol_type = other DNA
acacggtgggccaaaggat

SEQ ID NO: 206 - DNA, 19 bp, synthetic construct
  misc_feature 1..19: note = Synthetic oligonucleotide
  source 1..19: mol_type = other DNA
acggtgggccaaaggatga

SEQ ID NO: 207 - DNA, 19 bp, synthetic construct
  misc_feature 1..19: note = Synthetic oligonucleotide
  source 1..19: mol_type = other DNA
cggtgggccaaaggatgaa

SEQ ID NO: 208 - DNA, 19 bp, synthetic construct
  misc_feature 1..19: note = Synthetic oligonucleotide
  source 1..19: mol_type = other DNA
gtgggccaaaggatgaaga

SEQ ID NO: 209 - DNA, 19 bp, synthetic construct
  misc_feature 1..19: note = Synthetic oligonucleotide
  source 1..19: mol_type = other DNA
tgggccaaaggatgaagag

SEQ ID NO: 210 - DNA, 19 bp, synthetic construct
  misc_feature 1..19: note = Synthetic oligonucleotide
  source 1..19: mol_type = other DNA
gggccaaaggatgaagaga

SEQ ID NO: 211 - DNA, 19 bp, synthetic construct
  misc_feature 1..19: note = Synthetic oligonucleotide
  source 1..19: mol_type = other DNA
gccaaaggatgaagagagg

SEQ ID NO: 212 - DNA, 19 bp, synthetic construct
  misc_feature 1..19: note = Synthetic oligonucleotide
  source 1..19: mol_type = other DNA
caaaggatgaagagaggca

SEQ ID NO: 213 - DNA, 19 bp, synthetic construct
  misc_feature 1..19: note = Synthetic oligonucleotide
  source 1..19: mol_type = other DNA
aaaggatgaagagaggcat

SEQ ID NO: 214 - DNA, 19 bp, synthetic construct
  misc_feature 1..19: note = Synthetic oligonucleotide
  source 1..19: mol_type = other DNA
aggatgaagagaggcatgt

SEQ ID NO: 215 - DNA, 19 bp, synthetic construct
  misc_feature 1..19: note = Synthetic oligonucleotide
  source 1..19: mol_type = other DNA
ggatgaagagaggcatgtt

SEQ ID NO: 216 - DNA, 19 bp, synthetic construct
  misc_feature 1..19: note = Synthetic oligonucleotide
  source 1..19: mol_type = other DNA
gatgaagagaggcatgttg

SEQ ID NO: 217 - DNA, 19 bp, synthetic construct
  misc_feature 1..19: note = Synthetic oligonucleotide
  source 1..19: mol_type = other DNA
tgaagagaggcatgttgga

SEQ ID NO: 218 - DNA, 19 bp, synthetic construct
  misc_feature 1..19: note = Synthetic oligonucleotide
  source 1..19: mol_type = other DNA
aagagaggcatgttggaga

SEQ ID NO: 219 - DNA, 19 bp, synthetic construct
  misc_feature 1..19: note = Synthetic oligonucleotide
  source 1..19: mol_type = other DNA
agagaggcatgttggagac

SEQ ID NO: 220 - DNA, 19 bp, synthetic construct
  misc_feature 1..19: note = Synthetic oligonucleotide
  source 1..19: mol_type = other DNA
gagaggcatgttggagact

SEQ ID NO: 221 - DNA, 19 bp, synthetic construct
  misc_feature 1..19: note = Synthetic oligonucleotide
  source 1..19: mol_type = other DNA
agaggcatgttggagactt

SEQ ID NO: 222 - DNA, 19 bp, synthetic construct
  misc_feature 1..19: note = Synthetic oligonucleotide
  source 1..19: mol_type = other DNA
gaggcatgttggagacttg

SEQ ID NO: 223 - DNA, 19 bp, synthetic construct
  misc_feature 1..19: note = Synthetic oligonucleotide
  source 1..19: mol_type = other DNA
catgttggagacttgggca

SEQ ID NO: 224 - DNA, 19 bp, synthetic construct
  misc_feature 1..19: note = Synthetic oligonucleotide
  source 1..19: mol_type = other DNA
atgttggagacttgggcaa

SEQ ID NO: 225 - DNA, 19 bp, synthetic construct
  misc_feature 1..19: note = Synthetic oligonucleotide
  source 1..19: mol_type = other DNA
tgttggagacttgggcaat

SEQ ID NO: 226 - DNA, 19 bp, synthetic construct
  misc_feature 1..19: note = Synthetic oligonucleotide
  source 1..19: mol_type = other DNA
gttggagacttgggcaatg

SEQ ID NO: 227 - DNA, 19 bp, synthetic construct
  misc_feature 1..19: note = Synthetic oligonucleotide
  source 1..19: mol_type = other DNA
ttggagacttgggcaatgt

SEQ ID NO: 228 - DNA, 19 bp, synthetic construct
  misc_feature 1..19: note = Synthetic oligonucleotide
  source 1..19: mol_type = other DNA
tggagacttgggcaatgtg

SEQ ID NO: 229 - DNA, 19 bp, synthetic construct
  misc_feature 1..19: note = Synthetic oligonucleotide
  source 1..19: mol_type = other DNA
ggagacttgggcaatgtga

SEQ ID NO: 230 - DNA, 19 bp, synthetic construct
  misc_feature 1..19: note = Synthetic oligonucleotide
  source 1..19: mol_type = other DNA
agacttgggcaatgtgact

SEQ ID NO: 231 - DNA, 19 bp, synthetic construct
  misc_feature 1..19: note = Synthetic oligonucleotide
  source 1..19: mol_type = other DNA
cttgggcaatgtgactgct

SEQ ID NO: 232 - DNA, 19 bp, synthetic construct
  misc_feature 1..19: note = Synthetic oligonucleotide
  source 1..19: mol_type = other DNA
tgggcaatgtgactgctga

SEQ ID NO: 233 - DNA, 19 bp, synthetic construct
  misc_feature 1..19: note = Synthetic oligonucleotide
  source 1..19: mol_type = other DNA
ggcaatgtgactgctgaca

SEQ ID NO: 234 - DNA, 19 bp, synthetic construct
  misc_feature 1..19: note = Synthetic oligonucleotide
  source 1..19: mol_type = other DNA
gcaatgtgactgctgacaa

SEQ ID NO: 235 - DNA, 19 bp, synthetic construct
  misc_feature 1..19: note = Synthetic oligonucleotide
  source 1..19: mol_type = other DNA
caatgtgactgctgacaaa

SEQ ID NO: 236 - DNA, 19 bp, synthetic construct
  misc_feature 1..19: note = Synthetic oligonucleotide
  source 1..19: mol_type = other DNA
atgtgactgctgacaaaga

SEQ ID NO: 237 - DNA, 19 bp, synthetic construct
  misc_feature 1..19: note = Synthetic oligonucleotide
  source 1..19: mol_type = other DNA
tgtgactgctgacaaagat

SEQ ID NO: 238 - DNA, 19 bp, synthetic construct
  misc_feature 1..19: note = Synthetic oligonucleotide
  source 1..19: mol_type = other DNA
gtgactgctgacaaagatg

SEQ ID NO: 239 - DNA, 19 bp, synthetic construct
  misc_feature 1..19: note = Synthetic oligonucleotide
  source 1..19: mol_type = other DNA
tgactgctgacaaagatgc

SEQ ID NO: 240 - DNA, 19 bp, synthetic construct
  misc_feature 1..19: note = Synthetic oligonucleotide
  source 1..19: mol_type = other DNA
gactgctgacaaagatgct

SEQ ID NO: 241 - DNA, 19 bp, synthetic construct
  misc_feature 1..19: note = Synthetic oligonucleotide
  source 1..19: mol_type = other DNA
ctgctgacaaagatgctgt

SEQ ID NO: 242 - DNA, 19 bp, synthetic construct
  misc_feature 1..19: note = Synthetic oligonucleotide
  source 1..19: mol_type = other DNA
tgacaaagatgctgtggcc

SEQ ID NO: 243 - DNA, 19 bp, synthetic construct
  misc_feature 1..19: note = Synthetic oligonucleotide
  source 1..19: mol_type = other DNA
acaaagatgctgtggccga

SEQ ID NO: 244 - DNA, 19 bp, synthetic construct
  misc_feature 1..19: note = Synthetic oligonucleotide
  source 1..19: mol_type = other DNA
caaagatgctgtggccgat

SEQ ID NO: 245 - DNA, 19 bp, synthetic construct
  misc_feature 1..19: note = Synthetic oligonucleotide
  source 1..19: mol_type = other DNA
aagatgctgtggccgatgt

SEQ ID NO: 246 - DNA, 19 bp, synthetic construct
  misc_feature 1..19: note = Synthetic oligonucleotide
  source 1..19: mol_type = other DNA
agatgctgtggccgatgtg

SEQ ID NO: 247 - DNA, 19 bp, synthetic construct
  misc_feature 1..19: note = Synthetic oligonucleotide
  source 1..19: mol_type = other DNA
tgctgtggccgatgtgtct

SEQ ID NO: 248 - DNA, 19 bp, synthetic construct
  misc_feature 1..19: note = Synthetic oligonucleotide
  source 1..19: mol_type = other DNA
gctgtggccgatgtgtcta

SEQ ID NO: 249 - DNA, 19 bp, synthetic construct
  misc_feature 1..19: note = Synthetic oligonucleotide
  source 1..19: mol_type = other DNA
ctgtggccgatgtgtctat

SEQ ID NO: 250 - DNA, 19 bp, synthetic construct
  misc_feature 1..19: note = Synthetic oligonucleotide
  source 1..19: mol_type = other DNA
tgtggccgatgtgtctatt

SEQ ID NO: 251 - DNA, 19 bp, synthetic construct
  misc_feature 1..19: note = Synthetic oligonucleotide
  source 1..19: mol_type = other DNA
gtggccgatgtgtctattg

SEQ ID NO: 252 - DNA, 19 bp, synthetic construct
  misc_feature 1..19: note = Synthetic oligonucleotide
  source 1..19: mol_type = other DNA
tggccgatgtgtctattga

SEQ ID NO: 253 - DNA, 19 bp, synthetic construct
  misc_feature 1..19: note = Synthetic oligonucleotide
  source 1..19: mol_type = other DNA
ggccgatgtgtctattgaa

SEQ ID NO: 254 - DNA, 19 bp, synthetic construct
  misc_feature 1..19: note = Synthetic oligonucleotide
  source 1..19: mol_type = other DNA
gccgatgtgtctattgaag

SEQ ID NO: 255 - DNA, 19 bp, synthetic construct
  misc_feature 1..19: note = Synthetic oligonucleotide
  source 1..19: mol_type = other DNA
ccgatgtgtctattgaaga

SEQ ID NO: 256 - DNA, 19 bp, synthetic construct
  misc_feature 1..19: note = Synthetic oligonucleotide
  source 1..19: mol_type = other DNA
cgatgtgtctattgaagat

SEQ ID NO: 257 - DNA, 19 bp, synthetic construct
  misc_feature 1..19: note = Synthetic oligonucleotide
  source 1..19: mol_type = other DNA
ttgaagattctgtgatctc

SEQ ID NO: 258 - DNA, 19 bp, synthetic construct
  misc_feature 1..19: note = Synthetic oligonucleotide
  source 1..19: mol_type = other DNA
tgaagattctgtgatctca

SEQ ID NO: 259 - DNA, 19 bp, synthetic construct
  misc_feature 1..19: note = Synthetic oligonucleotide
  source 1..19: mol_type = other DNA
gaagattctgtgatctcac

SEQ ID NO: 260 - DNA, 19 bp, synthetic construct
  misc_feature 1..19: note = Synthetic oligonucleotide
  source 1..19: mol_type = other DNA
aagattctgtgatctcact

SEQ ID NO: 261 - DNA, 19 bp, synthetic construct
  misc_feature 1..19: note = Synthetic oligonucleotide
  source 1..19: mol_type = other DNA
agattctgtgatctcactc

SEQ ID NO: 262 - DNA, 19 bp, synthetic construct
  misc_feature 1..19: note = Synthetic oligonucleotide
  source 1..19: mol_type = other DNA
gattctgtgatctcactct

SEQ ID NO: 263 - DNA, 19 bp, synthetic construct
  misc_feature 1..19: note = Synthetic oligonucleotide
  source 1..19: mol_type = other DNA
attctgtgatctcactctc

SEQ ID NO: 264 - DNA, 19 bp, synthetic construct
  misc_feature 1..19: note = Synthetic oligonucleotide
  source 1..19: mol_type = other DNA
ttctgtgatctcactctca

SEQ ID NO: 265 - DNA, 19 bp, synthetic construct
  misc_feature 1..19: note = Synthetic oligonucleotide
  source 1..19: mol_type = other DNA
tctgtgatctcactctcag

SEQ ID NO: 266 - DNA, 19 bp, synthetic construct
  misc_feature 1..19: note = Synthetic oligonucleotide
  source 1..19: mol_type = other DNA
tgtgatctcactctcagga

SEQ ID NO: 267 - DNA, 19 bp, synthetic construct
  misc_feature 1..19: note = Synthetic oligonucleotide
  source 1..19: mol_type = other DNA
tgatctcactctcaggaga

SEQ ID NO: 268 - DNA, 19 bp, synthetic construct
  misc_feature 1..19: note = Synthetic oligonucleotide
  source 1..19: mol_type = other DNA
tctcactctcaggagacca

SEQ ID NO: 269 - DNA, 19 bp, synthetic construct
  misc_feature 1..19: note = Synthetic oligonucleotide
  source 1..19: mol_type = other DNA
ctcactctcaggagaccat

SEQ ID NO: 270 - DNA, 19 bp, synthetic construct
  misc_feature 1..19: note = Synthetic oligonucleotide
  source 1..19: mol_type = other DNA
tcactctcaggagaccatt

SEQ ID NO: 271 - DNA, 19 bp, synthetic construct
  misc_feature 1..19: note = Synthetic oligonucleotide
  source 1..19: mol_type = other DNA
cactctcaggagaccattg

SEQ ID NO: 272 - DNA, 19 bp, synthetic construct
  misc_feature 1..19: note = Synthetic oligonucleotide
  source 1..19: mol_type = other DNA
actctcaggagaccattgc

SEQ ID NO: 273 - DNA, 19 bp, synthetic construct
  misc_feature 1..19: note = Synthetic oligonucleotide
  source 1..19: mol_type = other DNA
ctctcaggagaccattgca

SEQ ID NO: 274 - DNA, 19 bp, synthetic construct
  misc_feature 1..19: note = Synthetic oligonucleotide
  source 1..19: mol_type = other DNA
tctcaggagaccattgcat

SEQ ID NO: 275 - DNA, 19 bp, synthetic construct
  misc_feature 1..19: note = Synthetic oligonucleotide
  source 1..19: mol_type = other DNA
tcaggagaccattgcatca

SEQ ID NO: 276 - DNA, 19 bp, synthetic construct
  misc_feature 1..19: note = Synthetic oligonucleotide
  source 1..19: mol_type = other DNA
caggagaccattgcatcat

SEQ ID NO: 277 - DNA, 19 bp, synthetic construct
  misc_feature 1..19: note = Synthetic oligonucleotide
  source 1..19: mol_type = other DNA
aggagaccattgcatcatt

SEQ ID NO: 278 - DNA, 19 bp, synthetic construct
  misc_feature 1..19: note = Synthetic oligonucleotide
  source 1..19: mol_type = other DNA
ggagaccattgcatcattg

SEQ ID NO: 279 - DNA, 19 bp, synthetic construct
  misc_feature 1..19: note = Synthetic oligonucleotide
  source 1..19: mol_type = other DNA
gagaccattgcatcattgg

SEQ ID NO: 280 - DNA, 19 bp, synthetic construct
  misc_feature 1..19: note = Synthetic oligonucleotide
  source 1..19: mol_type = other DNA
agaccattgcatcattggc

SEQ ID NO: 281 - DNA, 19 bp, synthetic construct
  misc_feature 1..19: note = Synthetic oligonucleotide
  source 1..19: mol_type = other DNA
ttgcatcattggccgcaca

SEQ ID NO: 282 - DNA, 19 bp, synthetic construct
  misc_feature 1..19: note = Synthetic oligonucleotide
  source 1..19: mol_type = other DNA
gcatcattggccgcacact

SEQ ID NO: 283 - DNA, 19 bp, synthetic construct
  misc_feature 1..19: note = Synthetic oligonucleotide
  source 1..19: mol_type = other DNA
tcattggccgcacactggt

SEQ ID NO: 284 - DNA, 19 bp, synthetic construct
  misc_feature 1..19: note = Synthetic oligonucleotide
  source 1..19: mol_type = other DNA
gccgcacactggtggtcca

SEQ ID NO: 285 - DNA, 19 bp, synthetic construct
  misc_feature 1..19: note = Synthetic oligonucleotide
  source 1..19: mol_type = other DNA
gcacactggtggtccatga

SEQ ID NO: 286 - DNA, 19 bp, synthetic construct
  misc_feature 1..19: note = Synthetic oligonucleotide
  source 1..19: mol_type = other DNA
cacactggtggtccatgaa

SEQ ID NO: 287 - DNA, 19 bp, synthetic construct
  misc_feature 1..19: note = Synthetic oligonucleotide
  source 1..19: mol_type = other DNA
acactggtggtccatgaaa

SEQ ID NO: 288 - DNA, 19 bp, synthetic construct
  misc_feature 1..19: note = Synthetic oligonucleotide
  source 1..19: mol_type = other DNA
cactggtggtccatgaaaa

SEQ ID NO: 289 - DNA, 19 bp, synthetic construct
  misc_feature 1..19: note = Synthetic oligonucleotide
  source 1..19: mol_type = other DNA
actggtggtccatgaaaaa

SEQ ID NO: 290 - DNA, 19 bp, synthetic construct
  misc_feature 1..19: note = Synthetic oligonucleotide
  source 1..19: mol_type = other DNA
ctggtggtccatgaaaaag

SEQ ID NO: 291 - DNA, 19 bp, synthetic construct
  misc_feature 1..19: note = Synthetic oligonucleotide
  source 1..19: mol_type = other DNA
tggtggtccatgaaaaagc

SEQ ID NO: 292 - DNA, 19 bp, synthetic construct
  misc_feature 1..19: note = Synthetic oligonucleotide
  source 1..19: mol_type = other DNA
ggtggtccatgaaaaagca

SEQ ID NO: 293 - DNA, 19 bp, synthetic construct
  misc_feature 1..19: note = Synthetic oligonucleotide
  source 1..19: mol_type = other DNA
tggtccatgaaaaagcaga

SEQ ID NO: 294 - DNA, 19 bp, synthetic construct
  misc_feature 1..19: note = Synthetic oligonucleotide
  source 1..19: mol_type = other DNA
ggtccatgaaaaagcagat

SEQ ID NO: 295 - DNA, 19 bp, synthetic construct
  misc_feature 1..19: note = Synthetic oligonucleotide
  source 1..19: mol_type = other DNA
tccatgaaaaagcagatga

SEQ ID NO: 296 - DNA, 19 bp, synthetic construct
  misc_feature 1..19: note = Synthetic oligonucleotide
  source 1..19: mol_type = other DNA
ccatgaaaaagcagatgac

SEQ ID NO: 297 - DNA, 19 bp, synthetic construct
  misc_feature 1..19: note = Synthetic oligonucleotide
  source 1..19: mol_type = other DNA
catgaaaaagcagatgact

SEQ ID NO: 298 - DNA, 19 bp, synthetic construct
  misc_feature 1..19: note = Synthetic oligonucleotide
  source 1..19: mol_type = other DNA
tgaaaaagcagatgacttg

SEQ ID NO: 299 - DNA, 19 bp, synthetic construct
  misc_feature 1..19: note = Synthetic oligonucleotide
  source 1..19: mol_type = other DNA
aaaaagcagatgacttggg

SEQ ID NO: 300 - DNA, 19 bp, synthetic construct
  misc_feature 1..19: note = Synthetic oligonucleotide
  source 1..19: mol_type = other DNA
aaaagcagatgacttgggc

SEQ ID NO: 301 - DNA, 19 bp, synthetic construct
  misc_feature 1..19: note = Synthetic oligonucleotide
  source 1..19: mol_type = other DNA
aaagcagatgacttgggca

SEQ ID NO: 302 - DNA, 19 bp, synthetic construct
  misc_feature 1..19: note = Synthetic oligonucleotide
  source 1..19: mol_type = other DNA
aagcagatgacttgggcaa

SEQ ID NO: 303 - DNA, 19 bp, synthetic construct
  misc_feature 1..19: note = Synthetic oligonucleotide
  source 1..19: mol_type = other DNA
agcagatgacttgggcaaa

SEQ ID NO: 304 - DNA, 19 bp, synthetic construct
  misc_feature 1..19: note = Synthetic oligonucleotide
  source 1..19: mol_type = other DNA
gcagatgacttgggcaaag

SEQ ID NO: 305 - DNA, 19 bp, synthetic construct
  misc_feature 1..19: note = Synthetic oligonucleotide
  source 1..19: mol_type = other DNA
cagatgacttgggcaaagg

SEQ ID NO: 306 - DNA, 19 bp, synthetic construct
  misc_feature 1..19: note = Synthetic oligonucleotide
  source 1..19: mol_type = other DNA
agatgacttgggcaaaggt

SEQ ID NO: 307 - DNA, 19 bp, synthetic construct
  misc_feature 1..19: note = Synthetic oligonucleotide
  source 1..19: mol_type = other DNA
tgacttgggcaaaggtgga

SEQ ID NO: 308 - DNA, 19 bp, synthetic construct
  misc_feature 1..19: note = Synthetic oligonucleotide
  source 1..19: mol_type = other DNA
gacttgggcaaaggtggaa

SEQ ID NO: 309 - DNA, 19 bp, synthetic construct
  misc_feature 1..19: note = Synthetic oligonucleotide
  source 1..19: mol_type = other DNA
acttgggcaaaggtggaaa

SEQ ID NO: 310 - DNA, 19 bp, synthetic construct
  misc_feature 1..19: note = Synthetic oligonucleotide
  source 1..19: mol_type = other DNA
cttgggcaaaggtggaaat

SEQ ID NO: 311 - DNA, 19 bp, synthetic construct
  misc_feature 1..19: note = Synthetic oligonucleotide
  source 1..19: mol_type = other DNA
ttgggcaaaggtggaaatg

SEQ ID NO: 312 - DNA, 19 bp, synthetic construct
  misc_feature 1..19: note = Synthetic oligonucleotide
  source 1..19: mol_type = other DNA
tgggcaaaggtggaaatga

SEQ ID NO: 313 - DNA, 19 bp, synthetic construct
  misc_feature 1..19: note = Synthetic oligonucleotide
  source 1..19: mol_type = other DNA
gggcaaaggtggaaatgaa

SEQ ID NO: 314 - DNA, 19 bp, synthetic construct
  misc_feature 1..19: note = Synthetic oligonucleotide
  source 1..19: mol_type = other DNA
ggcaaaggtggaaatgaag

SEQ ID NO: 315 - DNA, 19 bp, synthetic construct
  misc_feature 1..19: note = Synthetic oligonucleotide
  source 1..19: mol_type = other DNA
gcaaaggtggaaatgaaga

SEQ ID NO: 316 - DNA, 19 bp, synthetic construct
  misc_feature 1..19: note = Synthetic oligonucleotide
  source 1..19: mol_type = other DNA
caaaggtggaaatgaagaa

SEQ ID NO: 317 - DNA, 19 bp, synthetic construct
  misc_feature 1..19: note = Synthetic oligonucleotide
  source 1..19: mol_type = other DNA
aaggtggaaatgaagaaag

SEQ ID NO: 318 - DNA, 19 bp, synthetic construct
  misc_feature 1..19: note = Synthetic oligonucleotide
  source 1..19: mol_type = other DNA
aggtggaaatgaagaaagt

SEQ ID NO: 319 - DNA, 19 bp, synthetic construct
  misc_feature 1..19: note = Synthetic oligonucleotide
  source 1..19: mol_type = other DNA
ggtggaaatgaagaaagta

SEQ ID NO: 320 - DNA, 19 bp, synthetic construct
  misc_feature 1..19: note = Synthetic oligonucleotide
  source 1..19: mol_type = other DNA
gtggaaatgaagaaagtac

SEQ ID NO: 321 - DNA, 19 bp, synthetic construct
  misc_feature 1..19: note = Synthetic oligonucleotide
  source 1..19: mol_type = other DNA
gaagaaagtacaaagacag

SEQ ID NO: 322 - DNA, 19 bp, synthetic construct
  misc_feature 1..19: note = Synthetic oligonucleotide
  source 1..19: mol_type = other DNA
agaaagtacaaagacagga

SEQ ID NO: 323 - DNA, 19 bp, synthetic construct
  misc_feature 1..19: note = Synthetic oligonucleotide
  source 1..19: mol_type = other DNA
gaaagtacaaagacaggaa

SEQ ID NO: 324 - DNA, 19 bp, synthetic construct
  misc_feature 1..19: note = Synthetic oligonucleotide
  source 1..19: mol_type = other DNA
aagtacaaagacaggaaac

SEQ ID NO: 325 - DNA, 19 bp, synthetic construct
  misc_feature 1..19: note = Synthetic oligonucleotide
  source 1..19: mol_type = other DNA
tacaaagacaggaaacgct

SEQ ID NO: 326 - DNA, 19 bp, synthetic construct
  misc_feature 1..19: note = Synthetic oligonucleotide
  source 1..19: mol_type = other DNA
aaagacaggaaacgctgga

SEQ ID NO: 327 - DNA, 19 bp, synthetic construct
  misc_feature 1..19: note = Synthetic oligonucleotide
  source 1..19: mol_type = other DNA
aagacaggaaacgctggaa

SEQ ID NO: 328 - DNA, 19 bp, synthetic construct
  misc_feature 1..19: note = Synthetic oligonucleotide
  source 1..19: mol_type = other DNA
agacaggaaacgctggaag

SEQ ID NO: 329 - DNA, 19 bp, synthetic construct
  misc_feature 1..19: note = Synthetic oligonucleotide
  source 1..19: mol_type = other DNA
gacaggaaacgctggaagt

SEQ ID NO: 330 - DNA, 19 bp, synthetic construct
  misc_feature 1..19: note = Synthetic oligonucleotide
  source 1..19: mol_type = other DNA
acaggaaacgctggaagtc

SEQ ID NO: 331 - DNA, 19 bp, synthetic construct
  misc_feature 1..19: note = Synthetic oligonucleotide
  source 1..19: mol_type = other DNA
aggaaacgctggaagtcgt

SEQ ID NO: 332 - DNA, 19 bp, synthetic construct
  misc_feature 1..19: note = Synthetic oligonucleotide
  source 1..19: mol_type = other DNA
ggaaacgctggaagtcgtt

SEQ ID NO: 333 - DNA, 19 bp, synthetic construct
  misc_feature 1..19: note = Synthetic oligonucleotide
  source 1..19: mol_type = other DNA
gaaacgctggaagtcgttt

SEQ ID NO: 334 - DNA, 19 bp, synthetic construct
  misc_feature 1..19: note = Synthetic oligonucleotide
  source 1..19: mol_type = other DNA
aaacgctggaagtcgtttg

SEQ ID NO: 335 - DNA, 19 bp, synthetic construct
  misc_feature 1..19: note = Synthetic oligonucleotide
  source 1..19: mol_type = other DNA
aacgctggaagtcgtttgg

SEQ ID NO: 336 - DNA, 19 bp, synthetic construct
  misc_feature 1..19: note = Synthetic oligonucleotide
  source 1..19: mol_type = other DNA
cgctggaagtcgtttggct

SEQ ID NO: 337 - DNA, 19 bp, synthetic construct
  misc_feature 1..19: note = Synthetic oligonucleotide
  source 1..19: mol_type = other DNA
gctggaagtcgtttggctt

SEQ ID NO: 338 - DNA, 19 bp, synthetic construct
  misc_feature 1..19: note = Synthetic oligonucleotide
  source 1..19: mol_type = other DNA
tggaagtcgtttggcttgt

SEQ ID NO: 339 - DNA, 19 bp, synthetic construct
  misc_feature 1..19: note = Synthetic oligonucleotide
  source 1..19: mol_type = other DNA
ggaagtcgtttggcttgtg

SEQ ID NO: 340 - DNA, 19 bp, synthetic construct
  misc_feature 1..19: note = Synthetic oligonucleotide
  source 1..19: mol_type = other DNA
gaagtcgtttggcttgtgg

SEQ ID NO: 341 - DNA, 19 bp, synthetic construct
  misc_feature 1..19: note = Synthetic oligonucleotide
  source 1..19: mol_type = other DNA
aagtcgtttggcttgtggt

SEQ ID NO: 342 - DNA, 19 bp, synthetic construct
  misc_feature 1..19: note = Synthetic oligonucleotide
  source 1..19: mol_type = other DNA
tcgtttggcttgtggtgta

SEQ ID NO: 343 - DNA, 19 bp, synthetic construct
  misc_feature 1..19: note = Synthetic oligonucleotide
  source 1..19: mol_type = other DNA
cgtttggcttgtggtgtaa

SEQ ID NO: 344 - DNA, 19 bp, synthetic construct
  misc_feature 1..19: note = Synthetic oligonucleotide
  source 1..19: mol_type = other DNA
gtttggcttgtggtgtaat

SEQ ID NO: 345 - DNA, 19 bp, synthetic construct
  misc_feature 1..19: note = Synthetic oligonucleotide
  source 1..19: mol_type = other DNA
tttggcttgtggtgtaatt

SEQ ID NO: 346 - DNA, 19 bp, synthetic construct
  misc_feature 1..19: note = Synthetic oligonucleotide
  source 1..19: mol_type = other DNA
ttggcttgtggtgtaattg

SEQ ID NO: 347 - DNA, 19 bp, synthetic construct
  misc_feature 1..19: note = Synthetic oligonucleotide
  source 1..19: mol_type = other DNA
tggcttgtggtgtaattgg

SEQ ID NO: 348 - DNA, 19 bp, synthetic construct
  misc_feature 1..19: note = Synthetic oligonucleotide
  source 1..19: mol_type = other DNA
ggcttgtggtgtaattggg

SEQ ID NO: 349 - DNA, 19 bp, synthetic construct
  misc_feature 1..19: note = Synthetic oligonucleotide
  source 1..19: mol_type = other DNA
gcttgtggtgtaattggga

SEQ ID NO: 350 - DNA, 19 bp, synthetic construct
  misc_feature 1..19: note = Synthetic oligonucleotide
  source 1..19: mol_type = other DNA
cttgtggtgtaattgggat

SEQ ID NO: 351 - DNA, 19 bp, synthetic construct
  misc_feature 1..19: note = Synthetic oligonucleotide
  source 1..19: mol_type = other DNA
gtgtaattgggatcgccca

SEQ ID NO: 352 - DNA, 19 bp, synthetic construct
  misc_feature 1..19: note = Synthetic oligonucleotide
  source 1..19: mol_type = other DNA
tgtaattgggatcgcccaa

SEQ ID NO: 353 - DNA, 19 bp, synthetic construct
  misc_feature 1..19: note = Synthetic oligonucleotide
  source 1..19: mol_type = other DNA
gtaattgggatcgcccaat

SEQ ID NO: 354 - DNA, 19 bp, synthetic construct
  misc_feature 1..19: note = Synthetic oligonucleotide
  source 1..19: mol_type = other DNA
taattgggatcgcccaata

SEQ ID NO: 355 - DNA, 19 bp, synthetic construct
  misc_feature 1..19: note = Synthetic oligonucleotide
  source 1..19: mol_type = other DNA
aattgggatcgcccaataa

SEQ ID NO: 356 - DNA, 21 bp, synthetic construct
  misc_feature 1..21: note = Synthetic primer
  source 1..21: mol_type = other DNA
cgcgactaacaatcaaagtga

SEQ ID NO: 357 - RNA, 21 nt, synthetic construct
  modified_base 20..21: mod_base = OTHER; note = thymine
  misc_feature order(1,2,3,4,5,6,7,8,9,10,11,12,13,14,15,16,17,18,19): note = RNA
  misc_feature order(20,21): note = DNA
  misc_feature 1..21: note = Synthetic oligonucleotide
  source 1..21: mol_type = other RNA
cgacgaaggccgtgtgcgttt

SEQ ID NO: 358 - RNA, 21 nt, synthetic construct
  modified_base 20..21: mod_base = OTHER; note = thymine
  misc_feature order(1,2,3,4,5,6,7,8,9,10,11,12,13,14,15,16,17,18,19): note = RNA
  misc_feature order(20,21): note = DNA
  misc_feature 1..21: note = Synthetic oligonucleotide
  source 1..21: mol_type = other RNA
cgaaggccgtgtgcgtgcttt

SEQ ID NO: 359 - RNA, 21 nt, synthetic construct
  modified_base 20..21: mod_base = OTHER; note = thymine
  misc_feature order(1,2,3,4,5,6,7,8,9,10,11,12,13,14,15,16,17,18,19): note = RNA
  misc_feature order(20,21): note = DNA
  misc_feature 1..21: note = Synthetic oligonucleotide
  source 1..21: mol_type = other RNA
aaggccgtgtgcgtgctgatt

SEQ ID NO: 360 - RNA, 21 nt, synthetic construct
  modified_base 20..21: mod_base = OTHER; note = thymine
  misc_feature order(1,2,3,4,5,6,7,8,9,10,11,12,13,14,15,16,17,18,19): note = RNA
  misc_feature order(20,21): note = DNA
  misc_feature 1..21: note = Synthetic oligonucleotide
  source 1..21: mol_type = other RNA
aggccgtgtgcgtgctgaatt

SEQ ID NO: 361 - RNA, 21 nt, synthetic construct
  modified_base 20..21: mod_base = OTHER; note = thymine
  misc_feature order(1,2,3,4,5,6,7,8,9,10,11,12,13,14,15,16,17,18,19): note = RNA
  misc_feature order(20,21): note = DNA
  misc_feature 1..21: note = Synthetic oligonucleotide
  source 1..21: mol_type = other RNA
tgtgcgtgctgaagggcgatt

SEQ ID NO: 362 - RNA, 21 nt, synthetic construct
  modified_base 20..21: mod_base = OTHER; note = thymine
  misc_feature order(1,2,3,4,5,6,7,8,9,10,11,12,13,14,15,16,17,18,19): note = RNA
  misc_feature order(20,21): note = DNA
  misc_feature 1..21: note = Synthetic oligonucleotide
  source 1..21: mol_type = other RNA
acggcccagtgcagggcattt

SEQ ID NO: 363 - RNA, 21 nt, synthetic construct
  modified_base 20..21: mod_base = OTHER; note = thymine
  misc_feature order(1,2,3,4,5,6,7,8,9,10,11,12,13,14,15,16,17,18,19): note = RNA
  misc_feature order(20,21): note = DNA
  misc_feature 1..21: note = Synthetic oligonucleotide
  source 1..21: mol_type = other RNA
ggcccagtgcagggcatcatt

SEQ ID NO: 364 - RNA, 21 nt, synthetic construct
  modified_base 20..21: mod_base = OTHER; note = thymine
  misc_feature order(1,2,3,4,5,6,7,8,9,10,11,12,13,14,15,16,17,18,19): note = RNA
  misc_feature order(20,21): note = DNA
  misc_feature 1..21: note = Synthetic oligonucleotide
  source 1..21: mol_type = other RNA
gcccagtgcagggcatcattt

SEQ ID NO: 365 - RNA, 21 nt, synthetic construct
  modified_base 20..21: mod_base = OTHER; note = thymine
  misc_feature order(1,2,3,4,5,6,7,8,9,10,11,12,13,14,15,16,17,18,19): note = RNA
  misc_feature order(20,21): note = DNA
  misc_feature 1..21: note = Synthetic oligonucleotide
  source 1..21: mol_type = other RNA
ccagtgcagggcatcatcatt

SEQ ID NO: 366 - RNA, 21 nt, synthetic construct
  modified_base 20..21: mod_base = OTHER; note = thymine
  misc_feature order(1,2,3,4,5,6,7,8,9,10,11,12,13,14,15,16,17,18,19): note = RNA
  misc_feature order(20,21): note = DNA
  misc_feature 1..21: note = Synthetic oligonucleotide
  source 1..21: mol_type = other RNA
cagtgcagggcatcatcaatt

SEQ ID NO: 367 - RNA, 21 nt, synthetic construct
  modified_base 20..21: mod_base = OTHER; note = thymine
  misc_feature order(1,2,3,4,5,6,7,8,9,10,11,12,13,14,15,16,17,18,19): note = RNA
  misc_feature order(20,21): note = DNA
  misc_feature 1..21: note = Synthetic oligonucleotide
  source 1..21: mol_type = other RNA
agtgcagggcatcatcaattt

SEQ ID NO: 368 - RNA, 21 nt, synthetic construct
  modified_base 20..21: mod_base = OTHER; note = thymine
  misc_feature order(1,2,3,4,5,6,7,8,9,10,11,12,13,14,15,16,17,18,19): note = RNA
  misc_feature order(20,21): note = DNA
  misc_feature 1..21: note = Synthetic oligonucleotide
  source 1..21: mol_type = other RNA
gtgcagggcatcatcaatttt

SEQ ID NO: 369 - RNA, 21 nt, synthetic construct
  modified_base 20..21: mod_base = OTHER; note = thymine
  misc_feature order(1,2,3,4,5,6,7,8,9,10,11,12,13,14,15,16,17,18,19): note = RNA
  misc_feature order(20,21): note = DNA
  misc_feature 1..21: note = Synthetic oligonucleotide
  source 1..21: mol_type = other RNA
tgcagggcatcatcaattttt

SEQ ID NO: 370 - RNA, 21 nt, synthetic construct
  modified_base 20..21: mod_base = OTHER; note = thymine
  misc_feature order(1,2,3,4,5,6,7,8,9,10,11,12,13,14,15,16,17,18,19): note = RNA
  misc_feature order(20,21): note = DNA
  misc_feature 1..21: note = Synthetic oligonucleotide
  source 1..21: mol_type = other RNA
gcagggcatcatcaatttctt

SEQ ID NO: 371 - RNA, 21 nt, synthetic construct
  modified_base 20..21: mod_base = OTHER; note = thymine
  misc_feature order(1,2,3,4,5,6,7,8,9,10,11,12,13,14,15,16,17,18,19): note = RNA
  misc_feature order(20,21): note = DNA
  misc_feature 1..21: note = Synthetic oligonucleotide
  source 1..21: mol_type = other RNA
cagggcatcatcaatttcgtt

SEQ ID NO: 372 - RNA, 21 nt, synthetic construct
  modified_base 20..21: mod_base = OTHER; note = thymine
  misc_feature order(1,2,3,4,5,6,7,8,9,10,11,12,13,14,15,16,17,18,19): note = RNA
  misc_feature order(20,21): note = DNA
  misc_feature 1..21: note = Synthetic oligonucleotide
  source 1..21: mol_type = other RNA
agggcatcatcaatttcgatt

SEQ ID NO: 373 - RNA, 21 nt, synthetic construct
  modified_base 20..21: mod_base = OTHER; note = thymine
  misc_feature order(1,2,3,4,5,6,7,8,9,10,11,12,13,14,15,16,17,18,19): note = RNA
  misc_feature order(20,21): note = DNA
  misc_feature 1..21: note = Synthetic oligonucleotide
  source 1..21: mol_type = other RNA
gcatcatcaatttcgagcatt

SEQ ID NO: 374 - RNA, 21 nt, synthetic construct
  modified_base 20..21: mod_base = OTHER; note = thymine
  misc_feature order(1,2,3,4,5,6,7,8,9,10,11,12,13,14,15,16,17,18,19): note = RNA
  misc_feature order(20,21): note = DNA
  misc_feature 1..21: note = Synthetic oligonucleotide
  source 1..21: mol_type = other RNA
catcatcaatttcgagcagtt

SEQ ID NO: 375 - RNA, 21 nt, synthetic construct
  modified_base 20..21: mod_base = OTHER; note = thymine
  misc_feature order(1,2,3,4,5,6,7,8,9,10,11,12,13,14,15,16,17,18,19): note = RNA
  misc_feature order(20,21): note = DNA
  misc_feature 1..21: note = Synthetic oligonucleotide
  source 1..21: mol_type = other RNA
atcatcaatttcgagcagatt

SEQ ID NO: 376 - RNA, 21 nt, synthetic construct
  modified_base 20..21: mod_base = OTHER; note = thymine
  misc_feature order(1,2,3,4,5,6,7,8,9,10,11,12,13,14,15,16,17,18,19): note = RNA
  misc_feature order(20,21): note = DNA
  misc_feature 1..21: note = Synthetic oligonucleotide
  source 1..21: mol_type = other RNA
tcatcaatttcgagcagaatt

SEQ ID NO: 377 - RNA, 21 nt, synthetic construct
  modified_base 20..21: mod_base = OTHER; note = thymine
  misc_feature order(1,2,3,4,5,6,7,8,9,10,11,12,13,14,15,16,17,18,19): note = RNA
  misc_feature order(20,21): note = DNA
  misc_feature 1..21: note = Synthetic oligonucleotide
  source 1..21: mol_type = other RNA
tcaatttcgagcagaaggatt

SEQ ID NO: 378 - RNA, 21 nt, synthetic construct
  modified_base 20..21: mod_base = OTHER; note = thymine
  misc_feature order(1,2,3,4,5,6,7,8,9,10,11,12,13,14,15,16,17,18,19): note = RNA
  misc_feature order(20,21): note = DNA
  misc_feature 1..21: note = Synthetic oligonucleotide
  source 1..21: mol_type = other RNA
caatttcgagcagaaggaatt

SEQ ID NO: 379 - RNA, 21 nt, synthetic construct
  modified_base 20..21: mod_base = OTHER; note = thymine
  misc_feature order(1,2,3,4,5,6,7,8,9,10,11,12,13,14,15,16,17,18,19): note = RNA
  misc_feature order(20,21): note = DNA
  misc_feature 1..21: note = Synthetic oligonucleotide
  source 1..21: mol_type = other RNA
aatttcgagcagaaggaaatt

SEQ ID NO: 380 - RNA, 21 nt, synthetic construct
  modified_base 20..21: mod_base = OTHER; note = thymine
  misc_feature order(1,2,3,4,5,6,7,8,9,10,11,12,13,14,15,16,17,18,19): note = RNA
  misc_feature order(20,21): note = DNA
  misc_feature 1..21: note = Synthetic oligonucleotide
  source 1..21: mol_type = other RNA
atttcgagcagaaggaaagtt

SEQ ID NO: 381 - RNA, 21 nt, synthetic construct
  modified_base 20..21: mod_base = OTHER; note = thymine
  misc_feature order(1,2,3,4,5,6,7,8,9,10,11,12,13,14,15,16,17,18,19): note = RNA
  misc_feature order(20,21): note = DNA
  misc_feature 1..21: note = Synthetic oligonucleotide
  source 1..21: mol_type = other RNA
tttcgagcagaaggaaagttt

SEQ ID NO: 382 - RNA, 21 nt, synthetic construct
  modified_base 20..21: mod_base = OTHER; note = thymine
  misc_feature order(1,2,3,4,5,6,7,8,9,10,11,12,13,14,15,16,17,18,19): note = RNA
  misc_feature order(20,21): note = DNA
  misc_feature 1..21: note = Synthetic oligonucleotide
  source 1..21: mol_type = other RNA
ttcgagcagaaggaaagtatt

SEQ ID NO: 383 - RNA, 21 nt, synthetic construct
  modified_base 20..21: mod_base = OTHER; note = thymine
  misc_feature order(1,2,3,4,5,6,7,8,9,10,11,12,13,14,15,16,17,18,19): note = RNA
  misc_feature order(20,21): note = DNA
  misc_feature 1..21: note = Synthetic oligonucleotide
  source 1..21: mol_type = other RNA
tcgagcagaaggaaagtaatt

SEQ ID NO: 384 - RNA, 21 nt, synthetic construct
  modified_base 20..21: mod_base = OTHER; note = thymine
  misc_feature order(1,2,3,4,5,6,7,8,9,10,11,12,13,14,15,16,17,18,19): note = RNA
  misc_feature order(20,21): note = DNA
  misc_feature 1..21: note = Synthetic oligonucleotide
  source 1..21: mol_type = other RNA
cgagcagaaggaaagtaattt

SEQ ID NO: 385 - RNA, 21 nt, synthetic construct
  modified_base 20..21: mod_base = OTHER; note = thymine
  misc_feature order(1,2,3,4,5,6,7,8,9,10,11,12,13,14,15,16,17,18,19): note = RNA
  misc_feature order(20,21): note = DNA
  misc_feature 1..21: note = Synthetic oligonucleotide
  source 1..21: mol_type = other RNA
gagcagaaggaaagtaatgtt

SEQ ID NO: 386 - RNA, 21 nt, synthetic construct
  modified_base 20..21: mod_base = OTHER; note = thymine
  misc_feature order(1,2,3,4,5,6,7,8,9,10,11,12,13,14,15,16,17,18,19): note = RNA
  misc_feature order(20,21): note = DNA
  misc_feature 1..21: note = Synthetic oligonucleotide
  source 1..21: mol_type = other RNA
gcagaaggaaagtaatggatt

SEQ ID NO: 387 - RNA, 21 nt, synthetic construct
  modified_base 20..21: mod_base = OTHER; note = thymine
  misc_feature order(1,2,3,4,5,6,7,8,9,10,11,12,13,14,15,16,17,18,19): note = RNA
  misc_feature order(20,21): note = DNA
  misc_feature 1..21: note = Synthetic oligonucleotide
  source 1..21: mol_type = other RNA
gaaggaaagtaatggaccatt

SEQ ID NO: 388 - RNA, 21 nt, synthetic construct
  modified_base 20..21: mod_base = OTHER; note = thymine
  misc_feature order(1,2,3,4,5,6,7,8,9,10,11,12,13,14,15,16,17,18,19): note = RNA
  misc_feature order(20,21): note = DNA
  misc_feature 1..21: note = Synthetic oligonucleotide
  source 1..21: mol_type = other RNA
ggaaagtaatggaccagtgtt

SEQ ID NO: 389 - RNA, 21 nt, synthetic construct
  modified_base 20..21: mod_base = OTHER; note = thymine
  misc_feature order(1,2,3,4,5,6,7,8,9,10,11,12,13,14,15,16,17,18,19): note = RNA
  misc_feature order(20,21): note = DNA
  misc_feature 1..21: note = Synthetic oligonucleotide
  source 1..21: mol_type = other RNA
gaaagtaatggaccagtgatt

SEQ ID NO: 390 - RNA, 21 nt, synthetic construct
  modified_base 20..21: mod_base = OTHER; note = thymine
  misc_feature order(1,2,3,4,5,6,7,8,9,10,11,12,13,14,15,16,17,18,19): note = RNA
  misc_feature order(20,21): note = DNA
  misc_feature 1..21: note = Synthetic oligonucleotide
  source 1..21: mol_type = other RNA
aaagtaatggaccagtgaatt

SEQ ID NO: 391 - RNA, 21 nt, synthetic construct
  modified_base 20..21: mod_base = OTHER; note = thymine
  misc_feature order(1,2,3,4,5,6,7,8,9,10,11,12,13,14,15,16,17,18,19): note = RNA
  misc_feature order(20,21): note = DNA
  misc_feature 1..21: note = Synthetic oligonucleotide
  source 1..21: mol_type = other RNA
aagtaatggaccagtgaagtt

SEQ ID NO: 392 - RNA, 21 nt, synthetic construct
  modified_base 20..21: mod_base = OTHER; note = thymine
  misc_feature order(1,2,3,4,5,6,7,8,9,10,11,12,13,14,15,16,17,18,19): note = RNA
  misc_feature order(20,21): note = DNA
  misc_feature 1..21: note = Synthetic oligonucleotide
  source 1..21: mol_type = other RNA
gtaatggaccagtgaaggttt

SEQ ID NO: 393 - RNA, 21 nt, synthetic construct
  modified_base 20..21: mod_base = OTHER; note = thymine
  misc_feature order(1,2,3,4,5,6,7,8,9,10,11,12,13,14,15,16,17,18,19): note = RNA
  misc_feature order(20,21): note = DNA
  misc_feature 1..21: note = Synthetic oligonucleotide
  source 1..21: mol_type = other RNA
aatggaccagtgaaggtgttt

SEQ ID NO: 394 - RNA, 21 nt, synthetic construct
  modified_base 20..21: mod_base = OTHER; note = thymine
  misc_feature order(1,2,3,4,5,6,7,8,9,10,11,12,13,14,15,16,17,18,19): note = RNA
  misc_feature order(20,21): note = DNA
  misc_feature 1..21: note = Synthetic oligonucleotide
  source 1..21: mol_type = other RNA
atggaccagtgaaggtgtgtt

SEQ ID NO: 395 - RNA, 21 nt, synthetic construct
  modified_base 20..21: mod_base = OTHER; note = thymine
  misc_feature order(1,2,3,4,5,6,7,8,9,10,11,12,13,14,15,16,17,18,19): note = RNA
  misc_feature order(20,21): note = DNA
  misc_feature 1..21: note = Synthetic oligonucleotide
  source 1..21: mol_type = other RNA
ccagtgaaggtgtggggaatt

SEQ ID NO: 396 - RNA, 21 nt, synthetic construct
  modified_base 20..21: mod_base = OTHER; note = thymine
  misc_feature order(1,2,3,4,5,6,7,8,9,10,11,12,13,14,15,16,17,18,19): note = RNA
  misc_feature order(20,21): note = DNA
  misc_feature 1..21: note = Synthetic oligonucleotide
  source 1..21: mol_type = other RNA
gtgaaggtgtggggaagcatt

SEQ ID NO: 397 - RNA, 21 nt, synthetic construct
  modified_base 20..21: mod_base = OTHER; note = thymine
  misc_feature order(1,2,3,4,5,6,7,8,9,10,11,12,13,14,15,16,17,18,19): note = RNA
  misc_feature order(20,21): note = DNA
  misc_feature 1..21: note = Synthetic oligonucleotide
  source 1..21: mol_type = other RNA
tgaaggtgtggggaagcattt

SEQ ID NO: 398 - RNA, 21 nt, synthetic construct
  modified_base 20..21: mod_base = OTHER; note = thymine
  misc_feature order(1,2,3,4,5,6,7,8,9,10,11,12,13,14,15,16,17,18,19): note = RNA
  misc_feature order(20,21): note = DNA
  misc_feature 1..21: note = Synthetic oligonucleotide
  source 1..21: mol_type = other RNA
gaaggtgtggggaagcatttt

SEQ ID NO: 399 - RNA, 21 nt, synthetic construct
  modified_base 20..21: mod_base = OTHER; note = thymine
  misc_feature order(1,2,3,4,5,6,7,8,9,10,11,12,13,14,15,16,17,18,19): note = RNA
  misc_feature order(20,21): note = DNA
  misc_feature 1..21: note = Synthetic oligonucleotide
  source 1..21: mol_type = other RNA
aaggtgtggggaagcattatt

SEQ ID NO: 400 - RNA, 21 nt, synthetic construct
  modified_base 20..21: mod_base = OTHER; note = thymine
  misc_feature order(1,2,3,4,5,6,7,8,9,10,11,12,13,14,15,16,17,18,19): note = RNA
  misc_feature order(20,21): note = DNA
  misc_feature 1..21: note = Synthetic oligonucleotide
  source 1..21: mol_type = other RNA
aggtgtggggaagcattaatt

SEQ ID NO: 401 - RNA, 21 nt, synthetic construct
  modified_base 20..21: mod_base = OTHER; note = thymine
  misc_feature order(1,2,3,4,5,6,7,8,9,10,11,12,13,14,15,16,17,18,19): note = RNA
  misc_feature order(20,21): note = DNA
  misc_feature 1..21: note = Synthetic oligonucleotide
  source 1..21: mol_type = other RNA
ggtgtggggaagcattaaatt

SEQ ID NO: 402 - RNA, 21 nt, synthetic construct
  modified_base 20..21: mod_base = OTHER; note = thymine
  misc_feature order(1,2,3,4,5,6,7,8,9,10,11,12,13,14,15,16,17,18,19): note = RNA
  misc_feature order(20,21): note = DNA
  misc_feature 1..21: note = Synthetic oligonucleotide
  source 1..21: mol_type = other RNA
gtgtggggaagcattaaagtt

SEQ ID NO: 403 - RNA, 21 nt, synthetic construct
  modified_base 20..21: mod_base = OTHER; note = thymine
  misc_feature order(1,2,3,4,5,6,7,8,9,10,11,12,13,14,15,16,17,18,19): note = RNA
  misc_feature order(20,21): note = DNA
  misc_feature 1..21: note = Synthetic oligonucleotide
  source 1..21: mol_type = other RNA
tgtggggaagcattaaaggtt

SEQ ID NO: 404 - RNA, 21 nt, synthetic construct
  modified_base 20..21: mod_base = OTHER; note = thymine
  misc_feature order(1,2,3,4,5,6,7,8,9,10,11,12,13,14,15,16,17,18,19): note = RNA
  misc_feature order(20,21): note = DNA
  misc_feature 1..21: note = Synthetic oligonucleotide
  source 1..21: mol_type = other RNA
gtggggaagcattaaaggatt

SEQ ID NO: 405 - RNA, 21 nt, synthetic construct
  modified_base 20..21: mod_base = OTHER; note = thymine
  misc_feature order(1,2,3,4,5,6,7,8,9,10,11,12,13,14,15,16,17,18,19): note = RNA
  misc_feature order(20,21): note = DNA
  misc_feature 1..21: note = Synthetic oligonucleotide
  source 1..21: mol_type = other RNA
ggggaagcattaaaggacttt

SEQ ID NO: 406 - RNA, 21 nt, synthetic construct
  modified_base 20..21: mod_base = OTHER; note = thymine
  misc_feature order(1,2,3,4,5,6,7,8,9,10,11,12,13,14,15,16,17,18,19): note = RNA
  misc_feature order(20,21): note = DNA
  misc_feature 1..21: note = Synthetic oligonucleotide
  source 1..21: mol_type = other RNA
gggaagcattaaaggactgtt

SEQ ID NO: 407 - RNA, 21 nt, synthetic construct
  modified_base 20..21: mod_base = OTHER; note = thymine
  misc_feature order(1,2,3,4,5,6,7,8,9,10,11,12,13,14,15,16,17,18,19): note = RNA
  misc_feature order(20,21): note = DNA
  misc_feature 1..21: note = Synthetic oligonucleotide
  source 1..21: mol_type = other RNA
ggaagcattaaaggactgatt

SEQ ID NO: 408 - RNA, 21 nt, synthetic construct
  modified_base 20..21: mod_base = OTHER; note = thymine
  misc_feature order(1,2,3,4,5,6,7,8,9,10,11,12,13,14,15,16,17,18,19): note = RNA
  misc_feature order(20,21): note = DNA
  misc_feature 1..21: note = Synthetic oligonucleotide
  source 1..21: mol_type = other RNA
aagcattaaaggactgacttt

SEQ ID NO: 409 - RNA, 21 nt, synthetic construct
  modified_base 20..21: mod_base = OTHER; note = thymine
  misc_feature order(1,2,3,4,5,6,7,8,9,10,11,12,13,14,15,16,17,18,19): note = RNA
  misc_feature order(20,21): note = DNA
  misc_feature 1..21: note = Synthetic oligonucleotide
  source 1..21: mol_type = other RNA
gcattaaaggactgactgatt

SEQ ID NO: 410 - RNA, 21 nt, synthetic construct
  modified_base 20..21: mod_base = OTHER; note = thymine
  misc_feature order(1,2,3,4,5,6,7,8,9,10,11,12,13,14,15,16,17,18,19): note = RNA
  misc_feature order(20,21): note = DNA
  misc_feature 1..21: note = Synthetic oligonucleotide
  source 1..21: mol_type = other RNA
cattaaaggactgactgaatt

SEQ ID NO: 411 - RNA, 21 nt, synthetic construct
  modified_base 20..21: mod_base = OTHER; note = thymine
  misc_feature order(1,2,3,4,5,6,7,8,9,10,11,12,13,14,15,16,17,18,19): note = RNA
  misc_feature order(20,21): note = DNA
  misc_feature 1..21: note = Synthetic oligonucleotide
  source 1..21: mol_type = other RNA
attaaaggactgactgaagtt

SEQ ID NO: 412 - RNA, 21 nt, synthetic construct
  modified_base 20..21: mod_base = OTHER; note = thymine
  misc_feature order(1,2,3,4,5,6,7,8,9,10,11,12,13,14,15,16,17,18,19): note = RNA
  misc_feature order(20,21): note = DNA
  misc_feature 1..21: note = Synthetic oligonucleotide
  source 1..21: mol_type = other RNA
ttaaaggactgactgaaggtt

SEQ ID NO: 413 - RNA, 21 nt, synthetic construct
  modified_base 20..21: mod_base = OTHER; note = thymine
  misc_feature order(1,2,3,4,5,6,7,8,9,10,11,12,13,14,15,16,17,18,19): note = RNA
  misc_feature order(20,21): note = DNA
  misc_feature 1..21: note = Synthetic oligonucleotide
  source 1..21: mol_type = other RNA
taaaggactgactgaaggctt

SEQ ID NO: 414 - RNA, 21 nt, synthetic construct
  modified_base 20..21: mod_base = OTHER; note = thymine
  misc_feature order(1,2,3,4,5,6,7,8,9,10,11,12,13,14,15,16,17,18,19): note = RNA
  misc_feature order(20,21): note = DNA
  misc_feature 1..21: note = Synthetic oligonucleotide
  source 1..21: mol_type = other RNA
actgactgaaggcctgcattt

SEQ ID NO: 415 - RNA, 21 nt, synthetic construct
  modified_base 20..21: mod_base = OTHER; note = thymine
  misc_feature order(1,2,3,4,5,6,7,8,9,10,11,12,13,14,15,16,17,18,19): note = RNA
  misc_feature order(20,21): note = DNA
  misc_feature 1..21: note = Synthetic oligonucleotide
  source 1..21: mol_type = other RNA
gactgaaggcctgcatggatt

SEQ ID NO: 416 - RNA, 21 nt, synthetic construct
  modified_base 20..21: mod_base = OTHER; note = thymine
  misc_feature order(1,2,3,4,5,6,7,8,9,10,11,12,13,14,15,16,17,18,19): note = RNA
  misc_feature order(20,21): note = DNA
  misc_feature 1..21: note = Synthetic oligonucleotide
  source 1..21: mol_type = other RNA
actgaaggcctgcatggattt

SEQ ID NO: 417 - RNA, 21 nt, synthetic construct
  modified_base 20..21: mod_base = OTHER; note = thymine
  misc_feature order(1,2,3,4,5,6,7,8,9,10,11,12,13,14,15,16,17,18,19): note = RNA
  misc_feature order(20,21): note = DNA
  misc_feature 1..21: note = Synthetic oligonucleotide
  source 1..21: mol_type = other RNA
ctgaaggcctgcatggatttt

SEQ ID NO: 418 - RNA, 21 nt, synthetic construct
  modified_base 20..21: mod_base = OTHER; note = thymine
  misc_feature order(1,2,3,4,5,6,7,8,9,10,11,12,13,14,15,16,17,18,19): note = RNA
  misc_feature order(20,21): note = DNA
  misc_feature 1..21: note = Synthetic oligonucleotide
  source 1..21: mol_type = other RNA
tgaaggcctgcatggattctt

SEQ ID NO: 419 - RNA, 21 nt, synthetic construct
  modified_base 20..21: mod_base = OTHER; note = thymine
  misc_feature order(1,2,3,4,5,6,7,8,9,10,11,12,13,14,15,16,17,18,19): note = RNA
  misc_feature order(20,21): note = DNA
  misc_feature 1..21: note = Synthetic oligonucleotide
  source 1..21: mol_type = other RNA
aaggcctgcatggattccatt

SEQ ID NO: 420 - RNA, 21 nt, synthetic construct
  modified_base 20..21: mod_base = OTHER; note = thymine
  misc_feature order(1,2,3,4,5,6,7,8,9,10,11,12,13,14,15,16,17,18,19): note = RNA
  misc_feature order(20,21): note = DNA
  misc_feature 1..21: note = Synthetic oligonucleotide
  source 1..21: mol_type = other RNA
aggcctgcatggattccattt

SEQ ID NO: 421 - RNA, 21 nt, synthetic construct
  modified_base 20..21: mod_base = OTHER; note = thymine
  misc_feature order(1,2,3,4,5,6,7,8,9,10,11,12,13,14,15,16,17,18,19): note = RNA
  misc_feature order(20,21): note = DNA
  misc_feature 1..21: note = Synthetic oligonucleotide
  source 1..21: mol_type = other RNA
gcctgcatggattccatgttt

SEQ ID NO: 422 - RNA, 21 nt, synthetic construct
  modified_base 20..21: mod_base = OTHER; note = thymine
  misc_feature order(1,2,3,4,5,6,7,8,9,10,11,12,13,14,15,16,17,18,19): note = RNA
  misc_feature order(20,21): note = DNA
  misc_feature 1..21: note = Synthetic oligonucleotide
  source 1..21: mol_type = other RNA
cctgcatggattccatgtttt

SEQ ID NO: 423 - RNA, 21 nt, synthetic construct
  modified_base 20..21: mod_base = OTHER; note = thymine
  misc_feature order(1,2,3,4,5,6,7,8,9,10,11,12,13,14,15,16,17,18,19): note = RNA
  misc_feature order(20,21): note = DNA
  misc_feature 1..21: note = Synthetic oligonucleotide
  source 1..21: mol_type = other RNA
ctgcatggattccatgttctt

SEQ ID NO: 424 - RNA, 21 nt, synthetic construct
  modified_base 20..21: mod_base = OTHER; note = thymine
  misc_feature order(1,2,3,4,5,6,7,8,9,10,11,12,13,14,15,16,17,18,19): note = RNA
  misc_feature order(20,21): note = DNA
  misc_feature 1..21: note = Synthetic oligonucleotide
  source 1..21: mol_type = other RNA
tgcatggattccatgttcatt

SEQ ID NO: 425 - RNA, 21 nt, synthetic construct
  modified_base 20..21: mod_base = OTHER; note = thymine
  misc_feature order(1,2,3,4,5,6,7,8,9,10,11,12,13,14,15,16,17,18,19): note = RNA
  misc_feature order(20,21): note = DNA
  misc_feature 1..21: note = Synthetic oligonucleotide
  source 1..21: mol_type = other RNA
gcatggattccatgttcattt

SEQ ID NO: 426 - RNA, 21 nt, synthetic construct
  modified_base 20..21: mod_base = OTHER; note = thymine
  misc_feature order(1,2,3,4,5,6,7,8,9,10,11,12,13,14,15,16,17,18,19): note = RNA
  misc_feature order(20,21): note = DNA
  misc_feature 1..21: note = Synthetic oligonucleotide
  source 1..21: mol_type = other RNA
atggattccatgttcatgatt

SEQ ID NO: 427 - RNA, 21 nt, synthetic construct
  modified_base 20..21: mod_base = OTHER; note = thymine
  misc_feature order(1,2,3,4,5,6,7,8,9,10,11,12,13,14,15,16,17,18,19): note = RNA
  misc_feature order(20,21): note = DNA
  misc_feature 1..21: note = Synthetic oligonucleotide
  source 1..21: mol_type = other RNA
tggattccatgttcatgagtt

SEQ ID NO: 428 - RNA, 21 nt, synthetic construct
  modified_base 20..21: mod_base = OTHER; note = thymine
  misc_feature order(1,2,3,4,5,6,7,8,9,10,11,12,13,14,15,16,17,18,19): note = RNA
  misc_feature order(20,21): note = DNA
  misc_feature 1..21: note = Synthetic oligonucleotide
  source 1..21: mol_type = other RNA
ggattccatgttcatgagttt

SEQ ID NO: 429 - RNA, 21 nt, synthetic construct
  modified_base 20..21: mod_base = OTHER; note = thymine
  misc_feature order(1,2,3,4,5,6,7,8,9,10,11,12,13,14,15,16,17,18,19): note = RNA
  misc_feature order(20,21): note = DNA
  misc_feature 1..21: note = Synthetic oligonucleotide
  source 1..21: mol_type = other RNA
gattccatgttcatgagtttt

SEQ ID NO: 430 - RNA, 21 nt, synthetic construct
  modified_base 20..21: mod_base = OTHER; note = thymine
  misc_feature order(1,2,3,4,5,6,7,8,9,10,11,12,13,14,15,16,17,18,19): note = RNA
  misc_feature order(20,21): note = DNA
  misc_feature 1..21: note = Synthetic oligonucleotide
  source 1..21: mol_type = other RNA
tccatgttcatgagtttggtt

SEQ ID NO: 431 - RNA, 21 nt, synthetic construct
  modified_base 20..21: mod_base = OTHER; note = thymine
  misc_feature order(1,2,3,4,5,6,7,8,9,10,11,12,13,14,15,16,17,18,19): note = RNA
  misc_feature order(20,21): note = DNA
  misc_feature 1..21: note = Synthetic oligonucleotide
  source 1..21: mol_type = other RNA
ccatgttcatgagtttggatt

SEQ ID NO: 432 - RNA, 21 nt, synthetic construct
  modified_base 20..21: mod_base = OTHER; note = thymine
  misc_feature order(1,2,3,4,5,6,7,8,9,10,11,12,13,14,15,16,17,18,19): note = RNA
  misc_feature order(20,21): note = DNA
  misc_feature 1..21: note = Synthetic oligonucleotide
  source 1..21: mol_type = other RNA
atgttcatgagtttggagatt

SEQ ID NO: 433 - RNA, 21 nt, synthetic construct
  modified_base 20..21: mod_base = OTHER; note = thymine
  misc_feature order(1,2,3,4,5,6,7,8,9,10,11,12,13,14,15,16,17,18,19): note = RNA
  misc_feature order(20,21): note = DNA
  misc_feature 1..21: note = Synthetic oligonucleotide
  source 1..21: mol_type = other RNA
tgttcatgagtttggagattt

SEQ ID NO: 434 - RNA, 21 nt, synthetic construct
  modified_base 20..21: mod_base = OTHER; note = thymine
  misc_feature order(1,2,3,4,5,6,7,8,9,10,11,12,13,14,15,16,17,18,19): note = RNA
  misc_feature order(20,21): note = DNA
  misc_feature 1..21: note = Synthetic oligonucleotide
  source 1..21: mol_type = other RNA
gttcatgagtttggagatatt

SEQ ID NO: 435 - RNA, 21 nt, synthetic construct
  modified_base 20..21: mod_base = OTHER; note = thymine
  misc_feature order(1,2,3,4,5,6,7,8,9,10,11,12,13,14,15,16,17,18,19): note = RNA
  misc_feature order(20,21): note = DNA
  misc_feature 1..21: note = Synthetic oligonucleotide
  source 1..21: mol_type = other RNA
gagtttggagataatacagtt

SEQ ID NO: 436 - RNA, 21 nt, synthetic construct
  modified_base 20..21: mod_base = OTHER; note = thymine
  misc_feature order(1,2,3,4,5,6,7,8,9,10,11,12,13,14,15,16,17,18,19): note = RNA
  misc_feature order(20,21): note = DNA
  misc_feature 1..21: note = Synthetic oligonucleotide
  source 1..21: mol_type = other RNA
gtttggagataatacagcatt

SEQ ID NO: 437 - RNA, 21 nt, synthetic construct
  modified_base 20..21: mod_base = OTHER; note = thymine
  misc_feature order(1,2,3,4,5,6,7,8,9,10,11,12,13,14,15,16,17,18,19): note = RNA
  misc_feature order(20,21): note = DNA
  misc_feature 1..21: note = Synthetic oligonucleotide
  source 1..21: mol_type = other RNA
ggagataatacagcaggcttt

SEQ ID NO: 438 - RNA, 21 nt, synthetic construct
  modified_base 20..21: mod_base = OTHER; note = thymine
  misc_feature order(1,2,3,4,5,6,7,8,9,10,11,12,13,14,15,16,17,18,19): note = RNA
  misc_feature order(20,21): note = DNA
  misc_feature 1..21: note = Synthetic oligonucleotide
  source 1..21: mol_type = other RNA
agataatacagcaggctgttt

SEQ ID NO: 439 - RNA, 21 nt, synthetic construct
  modified_base 20..21: mod_base = OTHER; note = thymine
  misc_feature order(1,2,3,4,5,6,7,8,9,10,11,12,13,14,15,16,17,18,19): note = RNA
  misc_feature order(20,21): note = DNA
  misc_feature 1..21: note = Synthetic oligonucleotide
  source 1..21: mol_type = other RNA
gataatacagcaggctgtatt

SEQ ID NO: 440 - RNA, 21 nt, synthetic construct
  modified_base 20..21: mod_base = OTHER; note = thymine
  misc_feature order(1,2,3,4,5,6,7,8,9,10,11,12,13,14,15,16,17,18,19): note = RNA
  misc_feature order(20,21): note = DNA
  misc_feature 1..21: note = Synthetic oligonucleotide
  source 1..21: mol_type = other RNA
ataatacagcaggctgtactt

SEQ ID NO: 441 - RNA, 21 nt, synthetic construct
  modified_base 20..21: mod_base = OTHER; note = thymine
  misc_feature order(1,2,3,4,5,6,7,8,9,10,11,12,13,14,15,16,17,18,19): note = RNA
  misc_feature order(20,21): note = DNA
  misc_feature 1..21: note = Synthetic oligonucleotide
  source 1..21: mol_type = other RNA
taatacagcaggctgtacctt

SEQ ID NO: 442 - RNA, 21 nt, synthetic construct
  modified_base 20..21: mod_base = OTHER; note = thymine
  misc_feature order(1,2,3,4,5,6,7,8,9,10,11,12,13,14,15,16,17,18,19): note = RNA
  misc_feature order(20,21): note = DNA
  misc_feature 1..21: note = Synthetic oligonucleotide
  source 1..21: mol_type = other RNA
aatacagcaggctgtaccatt

SEQ ID NO: 443 - RNA, 21 nt, synthetic construct
  modified_base 20..21: mod_base = OTHER; note = thymine
  misc_feature order(1,2,3,4,5,6,7,8,9,10,11,12,13,14,15,16,17,18,19): note = RNA
  misc_feature order(20,21): note = DNA
  misc_feature 1..21: note = Synthetic oligonucleotide
  source 1..21: mol_type = other RNA
tacagcaggctgtaccagttt

SEQ ID NO: 444 - RNA, 21 nt, synthetic construct
  modified_base 20..21: mod_base = OTHER; note = thymine
  misc_feature order(1,2,3,4,5,6,7,8,9,10,11,12,13,14,15,16,17,18,19): note = RNA
  misc_feature order(20,21): note = DNA
  misc_feature 1..21: note = Synthetic oligonucleotide
  source 1..21: mol_type = other RNA
acagcaggctgtaccagtgtt

SEQ ID NO: 445 - RNA, 21 nt, synthetic construct
  modified_base 20..21: mod_base = OTHER; note = thymine
  misc_feature order(1,2,3,4,5,6,7,8,9,10,11,12,13,14,15,16,17,18,19): note = RNA
  misc_feature order(20,21): note = DNA
  misc_feature 1..21: note = Synthetic oligonucleotide
  source 1..21: mol_type = other RNA
agcaggctgtaccagtgcatt

SEQ ID NO: 446 - RNA, 21 nt, synthetic construct
  modified_base 20..21: mod_base = OTHER; note = thymine
  misc_feature order(1,2,3,4,5,6,7,8,9,10,11,12,13,14,15,16,17,18,19): note = RNA
  misc_feature order(20,21): note = DNA
  misc_feature 1..21: note = Synthetic oligonucleotide
  source 1..21: mol_type = other RNA
ctgtaccagtgcaggtccttt

SEQ ID NO: 447 - RNA, 21 nt, synthetic construct
  modified_base 20..21: mod_base = OTHER; note = thymine
  misc_feature order(1,2,3,4,5,6,7,8,9,10,11,12,13,14,15,16,17,18,19): note = RNA
  misc_feature order(20,21): note = DNA
  misc_feature 1..21: note = Synthetic oligonucleotide
  source 1..21: mol_type = other RNA
gtaccagtgcaggtcctcatt

SEQ ID NO: 448 - RNA, 21 nt, synthetic construct
  modified_base 20..21: mod_base = OTHER; note = thymine
  misc_feature order(1,2,3,4,5,6,7,8,9,10,11,12,13,14,15,16,17,18,19): note = RNA
  misc_feature order(20,21): note = DNA
  misc_feature 1..21: note = Synthetic oligonucleotide
  source 1..21: mol_type = other RNA
accagtgcaggtcctcacttt

SEQ ID NO: 449 - RNA, 21 nt, synthetic construct
  modified_base 20..21: mod_base = OTHER; note = thymine
  misc_feature order(1,2,3,4,5,6,7,8,9,10,11,12,13,14,15,16,17,18,19): note = RNA
  misc_feature order(20,21): note = DNA
  misc_feature 1..21: note = Synthetic oligonucleotide
  source 1..21: mol_type = other RNA
ccagtgcaggtcctcactttt

SEQ ID NO: 450 - RNA, 21 nt, synthetic construct
  modified_base 20..21: mod_base = OTHER; note = thymine
  misc_feature order(1,2,3,4,5,6,7,8,9,10,11,12,13,14,15,16,17,18,19): note = RNA
  misc_feature order(20,21): note = DNA
  misc_feature 1..21: note = Synthetic oligonucleotide
  source 1..21: mol_type = other RNA
cagtgcaggtcctcacttttt

SEQ ID NO: 451 - RNA, 21 nt, synthetic construct
  modified_base 20..21: mod_base = OTHER; note = thymine
  misc_feature order(1,2,3,4,5,6,7,8,9,10,11,12,13,14,15,16,17,18,19): note = RNA
  misc_feature order(20,21): note = DNA
  misc_feature 1..21: note = Synthetic oligonucleotide
  source 1..21: mol_type = other RNA
agtgcaggtcctcactttatt

SEQ ID NO: 452 - RNA, 21 nt, synthetic construct
  modified_base 20..21: mod_base = OTHER; note = thymine
  misc_feature order(1,2,3,4,5,6,7,8,9,10,11,12,13,14,15,16,17,18,19): note = RNA
  misc_feature order(20,21): note = DNA
  misc_feature 1..21: note = Synthetic oligonucleotide
  source 1..21: mol_type = other RNA
gtgcaggtcctcactttaatt

SEQ ID NO: 453 - RNA, 21 nt, synthetic construct
  modified_base 20..21: mod_base = OTHER; note = thymine
  misc_feature order(1,2,3,4,5,6,7,8,9,10,11,12,13,14,15,16,17,18,19): note = RNA
  misc_feature order(20,21): note = DNA
  misc_feature 1..21: note = Synthetic oligonucleotide
  source 1..21: mol_type = other RNA
tgcaggtcctcactttaattt

SEQ ID NO: 454 - RNA, 21 nt, synthetic construct
  modified_base 20..21: mod_base = OTHER; note = thymine
  misc_feature order(1,2,3,4,5,6,7,8,9,10,11,12,13,14,15,16,17,18,19): note = RNA
  misc_feature order(20,21): note = DNA
  misc_feature 1..21: note = Synthetic oligonucleotide
  source 1..21: mol_type = other RNA
gcaggtcctcactttaatctt

SEQ ID NO: 455 - RNA, 21 nt, synthetic construct
  modified_base 20..21: mod_base = OTHER; note = thymine
  misc_feature order(1,2,3,4,5,6,7,8,9,10,11,12,13,14,15,16,17,18,19): note = RNA
  misc_feature order(20,21): note = DNA
  misc_feature 1..21: note = Synthetic oligonucleotide
  source 1..21: mol_type = other RNA
caggtcctcactttaatcctt

SEQ ID NO: 456 - RNA, 21 nt, synthetic construct
  modified_base 20..21: mod_base = OTHER; note = thymine
  misc_feature order(1,2,3,4,5,6,7,8,9,10,11,12,13,14,15,16,17,18,19): note = RNA
  misc_feature order(20,21): note = DNA
  misc_feature 1..21: note = Synthetic oligonucleotide
  source 1..21: mol_type = other RNA
aggtcctcactttaatccttt

SEQ ID NO: 457 - RNA, 21 nt, synthetic construct
  modified_base 20..21: mod_base = OTHER; note = thymine
  misc_feature order(1,2,3,4,5,6,7,8,9,10,11,12,13,14,15,16,17,18,19): note = RNA
  misc_feature order(20,21): note = DNA
  misc_feature 1..21: note = Synthetic oligonucleotide
  source 1..21: mol_type = other RNA
ggtcctcactttaatcctctt

SEQ ID NO: 458 - RNA, 21 nt, synthetic construct
  modified_base 20..21: mod_base = OTHER; note = thymine
  misc_feature order(1,2,3,4,5,6,7,8,9,10,11,12,13,14,15,16,17,18,19): note = RNA
  misc_feature order(20,21): note = DNA
  misc_feature 1..21: note = Synthetic oligonucleotide
  source 1..21: mol_type = other RNA
gtcctcactttaatcctcttt

SEQ ID NO: 459 - RNA, 21 nt, synthetic construct
  modified_base 20..21: mod_base = OTHER; note = thymine
  misc_feature order(1,2,3,4,5,6,7,8,9,10,11,12,13,14,15,16,17,18,19): note = RNA
  misc_feature order(20,21): note = DNA
  misc_feature 1..21: note = Synthetic oligonucleotide
  source 1..21: mol_type = other RNA
tcctcactttaatcctctatt

SEQ ID NO: 460 - RNA, 21 nt, synthetic construct
  modified_base 20..21: mod_base = OTHER; note = thymine
  misc_feature order(1,2,3,4,5,6,7,8,9,10,11,12,13,14,15,16,17,18,19): note = RNA
  misc_feature order(20,21): note = DNA
  misc_feature 1..21: note = Synthetic oligonucleotide
  source 1..21: mol_type = other RNA
cctcactttaatcctctattt

SEQ ID NO: 461 - RNA, 21 nt, synthetic construct
  modified_base 20..21: mod_base = OTHER; note = thymine
  misc_feature order(1,2,3,4,5,6,7,8,9,10,11,12,13,14,15,16,17,18,19): note = RNA
  misc_feature order(20,21): note = DNA
  misc_feature 1..21: note = Synthetic oligonucleotide
  source 1..21: mol_type = other RNA
ctcactttaatcctctatctt

SEQ ID NO: 462 - RNA, 21 nt, synthetic construct
  modified_base 20..21: mod_base = OTHER; note = thymine
  misc_feature order(1,2,3,4,5,6,7,8,9,10,11,12,13,14,15,16,17,18,19): note = RNA
  misc_feature order(20,21): note = DNA
  misc_feature 1..21: note = Synthetic oligonucleotide
  source 1..21: mol_type = other RNA
tcactttaatcctctatcctt

SEQ ID NO: 463 - RNA, 21 nt, synthetic construct
  modified_base 20..21: mod_base = OTHER; note = thymine
  misc_feature order(1,2,3,4,5,6,7,8,9,10,11,12,13,14,15,16,17,18,19): note = RNA
  misc_feature order(20,21): note = DNA
  misc_feature 1..21: note = Synthetic oligonucleotide
  source 1..21: mol_type = other RNA
cactttaatcctctatccatt

SEQ ID NO: 464 - RNA, 21 nt, synthetic construct
  modified_base 20..21: mod_base = OTHER; note = thymine
  misc_feature order(1,2,3,4,5,6,7,8,9,10,11,12,13,14,15,16,17,18,19): note = RNA
  misc_feature order(20,21): note = DNA
  misc_feature 1..21: note = Synthetic oligonucleotide
  source 1..21: mol_type = other RNA
ctttaatcctctatccagatt

SEQ ID NO: 465 - RNA, 21 nt, synthetic construct
  modified_base 20..21: mod_base = OTHER; note = thymine
  misc_feature order(1,2,3,4,5,6,7,8,9,10,11,12,13,14,15,16,17,18,19): note = RNA
  misc_feature order(20,21): note = DNA
  misc_feature 1..21: note = Synthetic oligonucleotide
  source 1..21: mol_type = other RNA
aatcctctatccagaaaactt

SEQ ID NO: 466 - RNA, 21 nt, synthetic construct
  modified_base 20..21: mod_base = OTHER; note = thymine
  misc_feature order(1,2,3,4,5,6,7,8,9,10,11,12,13,14,15,16,17,18,19): note = RNA
  misc_feature order(20,21): note = DNA
  misc_feature 1..21: note = Synthetic oligonucleotide
  source 1..21: mol_type = other RNA
atcctctatccagaaaacatt

SEQ ID NO: 467 - RNA, 21 nt, synthetic construct
  modified_base 20..21: mod_base = OTHER; note = thymine
  misc_feature order(1,2,3,4,5,6,7,8,9,10,11,12,13,14,15,16,17,18,19): note = RNA
  misc_feature order(20,21): note = DNA
  misc_feature 1..21: note = Synthetic oligonucleotide
  source 1..21: mol_type = other RNA
tcctctatccagaaaacactt

SEQ ID NO: 468 - RNA, 21 nt, synthetic construct
  modified_base 20..21: mod_base = OTHER; note = thymine
  misc_feature order(1,2,3,4,5,6,7,8,9,10,11,12,13,14,15,16,17,18,19): note = RNA
  misc_feature order(20,21): note = DNA
  misc_feature 1..21: note = Synthetic oligonucleotide
  source 1..21: mol_type = other RNA
tctatccagaaaacacggttt

SEQ ID NO: 469 - RNA, 21 nt, synthetic construct
  modified_base 20..21: mod_base = OTHER; note = thymine
  misc_feature order(1,2,3,4,5,6,7,8,9,10,11,12,13,14,15,16,17,18,19): note = RNA
  misc_feature order(20,21): note = DNA
  misc_feature 1..21: note = Synthetic oligonucleotide
  source 1..21: mol_type = other RNA
agaaaacacggtgggccaatt

SEQ ID NO: 470 - RNA, 21 nt, synthetic construct
  modified_base 20..21: mod_base = OTHER; note = thymine
  misc_feature order(1,2,3,4,5,6,7,8,9,10,11,12,13,14,15,16,17,18,19): note = RNA
  misc_feature order(20,21): note = DNA
  misc_feature 1..21: note = Synthetic oligonucleotide
  source 1..21: mol_type = other RNA
gaaaacacggtgggccaaatt

SEQ ID NO: 471 - RNA, 21 nt, synthetic construct
  modified_base 20..21: mod_base = OTHER; note = thymine
  misc_feature order(1,2,3,4,5,6,7,8,9,10,11,12,13,14,15,16,17,18,19): note = RNA
  misc_feature order(20,21): note = DNA
  misc_feature 1..21: note = Synthetic oligonucleotide
  source 1..21: mol_type = other RNA
aaaacacggtgggccaaagtt

SEQ ID NO: 472 - RNA, 21 nt, synthetic construct
  modified_base 20..21: mod_base = OTHER; note = thymine
  misc_feature order(1,2,3,4,5,6,7,8,9,10,11,12,13,14,15,16,17,18,19): note = RNA
  misc_feature order(20,21): note = DNA
  misc_feature 1..21: note = Synthetic oligonucleotide
  source 1..21: mol_type = other RNA
aaacacggtgggccaaaggtt

SEQ ID NO: 473 - RNA, 21 nt, synthetic construct
  modified_base 20..21: mod_base = OTHER; note = thymine
  misc_feature order(1,2,3,4,5,6,7,8,9,10,11,12,13,14,15,16,17,18,19): note = RNA
  misc_feature order(20,21): note = DNA
  misc_feature 1..21: note = Synthetic oligonucleotide
  source 1..21: mol_type = other RNA
aacacggtgggccaaaggatt

SEQ ID NO: 474 - RNA, 21 nt, synthetic construct
  modified_base 20..21: mod_base = OTHER; note = thymine
  misc_feature order(1,2,3,4,5,6,7,8,9,10,11,12,13,14,15,16,17,18,19): note = RNA
  misc_feature order(20,21): note = DNA
  misc_feature 1..21: note = Synthetic oligonucleotide
  source 1..21: mol_type = other RNA
acacggtgggccaaaggattt

SEQ ID NO: 475 - RNA, 21 nt, synthetic construct
  modified_base 20..21: mod_base = OTHER; note = thymine
  misc_feature order(1,2,3,4,5,6,7,8,9,10,11,12,13,14,15,16,17,18,19): note = RNA
  misc_feature order(20,21): note = DNA
  misc_feature 1..21: note = Synthetic oligonucleotide
  source 1..21: mol_type = other RNA
acggtgggccaaaggatgatt

SEQ ID NO: 476 - RNA, 21 nt, synthetic construct
  modified_base 20..21: mod_base = OTHER; note = thymine
  misc_feature order(1,2,3,4,5,6,7,8,9,10,11,12,13,14,15,16,17,18,19): note = RNA
  misc_feature order(20,21): note = DNA
  misc_feature 1..21: note = Synthetic oligonucleotide
  source 1..21: mol_type = other RNA
cggtgggccaaaggatgaatt

SEQ ID NO: 477 - RNA, 21 nt, synthetic construct
  modified_base 20..21: mod_base = OTHER; note = thymine
  misc_feature order(1,2,3,4,5,6,7,8,9,10,11,12,13,14,15,16,17,18,19): note = RNA
  misc_feature order(20,21): note = DNA
  misc_feature 1..21: note = Synthetic oligonucleotide
  source 1..21: mol_type = other RNA
gtgggccaaaggatgaagatt

SEQ ID NO: 478 - RNA, 21 nt, synthetic construct
  modified_base 20..21: mod_base = OTHER; note = thymine
  misc_feature order(1,2,3,4,5,6,7,8,9,10,11,12,13,14,15,16,17,18,19): note = RNA
  misc_feature order(20,21): note = DNA
  misc_feature 1..21: note = Synthetic oligonucleotide
  source 1..21: mol_type = other RNA
tgggccaaaggatgaagagtt

SEQ ID NO: 479 - RNA, 21 nt, synthetic construct
  modified_base 20..21: mod_base = OTHER; note = thymine
  misc_feature order(1,2,3,4,5,6,7,8,9,10,11,12,13,14,15,16,17,18,19): note = RNA
  misc_feature order(20,21): note = DNA
  misc_feature 1..21: note = Synthetic oligonucleotide
  source 1..21: mol_type = other RNA
gggccaaaggatgaagagatt

SEQ ID NO: 480 - RNA, 21 nt, synthetic construct
  modified_base 20..21: mod_base = OTHER; note = thymine
  misc_feature order(1,2,3,4,5,6,7,8,9,10,11,12,13,14,15,16,17,18,19): note = RNA
  misc_feature order(20,21): note = DNA
  misc_feature 1..21: note = Synthetic oligonucleotide
  source 1..21: mol_type = other RNA
gccaaaggatgaagagaggtt

SEQ ID NO: 481 - RNA, 21 nt, synthetic construct
  modified_base 20..21: mod_base = OTHER; note = thymine
  misc_feature order(1,2,3,4,5,6,7,8,9,10,11,12,13,14,15,16,17,18,19): note = RNA
  misc_feature order(20,21): note = DNA
  misc_feature 1..21: note = Synthetic oligonucleotide
  source 1..21: mol_type = other RNA
caaaggatgaagagaggcatt

SEQ ID NO: 482 - RNA, 21 nt, synthetic construct
  modified_base 20..21: mod_base = OTHER; note = thymine
  misc_feature order(1,2,3,4,5,6,7,8,9,10,11,12,13,14,15,16,17,18,19): note = RNA
  misc_feature order(20,21): note = DNA
  misc_feature 1..21: note = Synthetic oligonucleotide
  source 1..21: mol_type = other RNA
aaaggatgaagagaggcattt

SEQ ID NO: 483 - RNA, 21 nt, synthetic construct
  modified_base 20..21: mod_base = OTHER; note = thymine
  misc_feature order(1,2,3,4,5,6,7,8,9,10,11,12,13,14,15,16,17,18,19): note = RNA
  misc_feature order(20,21): note = DNA
  misc_feature 1..21: note = Synthetic oligonucleotide
  source 1..21: mol_type = other RNA
aggatgaagagaggcatgttt

SEQ ID NO: 484 - RNA, 21 nt, synthetic construct
  modified_base 20..21: mod_base = OTHER; note = thymine
  misc_feature order(1,2,3,4,5,6,7,8,9,10,11,12,13,14,15,16,17,18,19): note = RNA
  misc_feature order(20,21): note = DNA
  misc_feature 1..21: note = Synthetic oligonucleotide
  source 1..21: mol_type = other RNA
ggatgaagagaggcatgtttt

SEQ ID NO: 485 - RNA, 21 nt, synthetic construct
  modified_base 20..21: mod_base = OTHER; note = thymine
  misc_feature order(1,2,3,4,5,6,7,8,9,10,11,12,13,14,15,16,17,18,19): note = RNA
  misc_feature order(20,21): note = DNA
  misc_feature 1..21: note = Synthetic oligonucleotide
  source 1..21: mol_type = other RNA
gatgaagagaggcatgttgtt

SEQ ID NO: 486 - RNA, 21 nt, synthetic construct
  modified_base 20..21: mod_base = OTHER; note = thymine
  misc_feature order(1,2,3,4,5,6,7,8,9,10,11,12,13,14,15,16,17,18,19): note = RNA
  misc_feature order(20,21): note = DNA
  misc_feature 1..21: note = Synthetic oligonucleotide
  source 1..21: mol_type = other RNA
tgaagagaggcatgttggatt

SEQ ID NO: 487 - RNA, 21 nt, synthetic construct
  modified_base 20..21: mod_base = OTHER; note = thymine
  misc_feature order(1,2,3,4,5,6,7,8,9,10,11,12,13,14,15,16,17,18,19): note = RNA
  misc_feature order(20,21): note = DNA
  misc_feature 1..21: note = Synthetic oligonucleotide
  source 1..21: mol_type = other RNA
aagagaggcatgttggagatt

SEQ ID NO: 488 - RNA, 21 nt, synthetic construct
  modified_base 20..21: mod_base = OTHER; note = thymine
  misc_feature order(1,2,3,4,5,6,7,8,9,10,11,12,13,14,15,16,17,18,19): note = RNA
  misc_feature order(20,21): note = DNA
  misc_feature 1..21: note = Synthetic oligonucleotide
  source 1..21: mol_type = other RNA
agagaggcatgttggagactt

SEQ ID NO: 489 - RNA, 21 nt, synthetic construct
  modified_base 20..21: mod_base = OTHER; note = thymine
  misc_feature order(1,2,3,4,5,6,7,8,9,10,11,12,13,14,15,16,17,18,19): note = RNA
  misc_feature order(20,21): note = DNA
  misc_feature 1..21: note = Synthetic oligonucleotide
  source 1..21: mol_type = other RNA
gagaggcatgttggagacttt

SEQ ID NO: 490 - RNA, 21 nt, synthetic construct
  modified_base 20..21: mod_base = OTHER; note = thymine
  misc_feature order(1,2,3,4,5,6,7,8,9,10,11,12,13,14,15,16,17,18,19): note = RNA
  misc_feature order(20,21): note = DNA
  misc_feature 1..21: note = Synthetic oligonucleotide
  source 1..21: mol_type = other RNA
agaggcatgttggagactttt

SEQ ID NO: 491 - RNA, 21 nt, synthetic construct
  modified_base 20..21: mod_base = OTHER; note = thymine
  misc_feature order(1,2,3,4,5,6,7,8,9,10,11,12,13,14,15,16,17,18,19): note = RNA
  misc_feature order(20,21): note = DNA
  misc_feature 1..21: note = Synthetic oligonucleotide
  source 1..21: mol_type = other RNA
gaggcatgttggagacttgtt

SEQ ID NO: 492 - RNA, 21 nt, synthetic construct
  modified_base 20..21: mod_base = OTHER; note = thymine
  misc_feature order(1,2,3,4,5,6,7,8,9,10,11,12,13,14,15,16,17,18,19): note = RNA
  misc_feature order(20,21): note = DNA
  misc_feature 1..21: note = Synthetic oligonucleotide
  source 1..21: mol_type = other RNA
catgttggagacttgggcatt

SEQ ID NO: 493 - RNA, 21 nt, synthetic construct
  modified_base 20..21: mod_base = OTHER; note = thymine
  misc_feature order(1,2,3,4,5,6,7,8,9,10,11,12,13,14,15,16,17,18,19): note = RNA
  misc_feature order(20,21): note = DNA
  misc_feature 1..21: note = Synthetic oligonucleotide
  source 1..21: mol_type = other RNA
atgttggagacttgggcaatt

SEQ ID NO: 494 - RNA, 21 nt, synthetic construct
  modified_base 20..21: mod_base = OTHER; note = thymine
  misc_feature order(1,2,3,4,5,6,7,8,9,10,11,12,13,14,15,16,17,18,19): note = RNA
  misc_feature order(20,21): note = DNA
  misc_feature 1..21: note = Synthetic oligonucleotide
  source 1..21: mol_type = other RNA
tgttggagacttgggcaattt

SEQ ID NO: 495 - RNA, 21 nt, synthetic construct
  modified_base 20..21: mod_base = OTHER; note = thymine
  misc_feature order(1,2,3,4,5,6,7,8,9,10,11,12,13,14,15,16,17,18,19): note = RNA
  misc_feature order(20,21): note = DNA
  misc_feature 1..21: note = Synthetic oligonucleotide
  source 1..21: mol_type = other RNA
gttggagacttgggcaatgtt

SEQ ID NO: 496 - RNA, 21 nt, synthetic construct
  modified_base 20..21: mod_base = OTHER; note = thymine
  misc_feature order(1,2,3,4,5,6,7,8,9,10,11,12,13,14,15,16,17,18,19): note = RNA
  misc_feature order(20,21): note = DNA
  misc_feature 1..21: note = Synthetic oligonucleotide
  source 1..21: mol_type = other RNA
ttggagacttgggcaatgttt

SEQ ID NO: 497 - RNA, 21 nt, synthetic construct
  modified_base 20..21: mod_base = OTHER; note = thymine
  misc_feature order(1,2,3,4,5,6,7,8,9,10,11,12,13,14,15,16,17,18,19): note = RNA
  misc_feature order(20,21): note = DNA
  misc_feature 1..21: note = Synthetic oligonucleotide
  source 1..21: mol_type = other RNA
tggagacttgggcaatgtgtt

SEQ ID NO: 498 - RNA, 21 nt, synthetic construct
  modified_base 20..21: mod_base = OTHER; note = thymine
  misc_feature order(1,2,3,4,5,6,7,8,9,10,11,12,13,14,15,16,17,18,19): note = RNA
  misc_feature order(20,21): note = DNA
  misc_feature 1..21: note = Synthetic oligonucleotide
  source 1..21: mol_type = other RNA
ggagacttgggcaatgtgatt

SEQ ID NO: 499 - RNA, 21 nt, synthetic construct
  modified_base 20..21: mod_base = OTHER; note = thymine
  misc_feature order(1,2,3,4,5,6,7,8,9,10,11,12,13,14,15,16,17,18,19): note = RNA
  misc_feature order(20,21): note = DNA
  misc_feature 1..21: note = Synthetic oligonucleotide
  source 1..21: mol_type = other RNA
agacttgggcaatgtgacttt

SEQ ID NO: 500 - RNA, 21 nt, synthetic construct
  modified_base 20..21: mod_base = OTHER; note = thymine
  misc_feature order(1,2,3,4,5,6,7,8,9,10,11,12,13,14,15,16,17,18,19): note = RNA
  misc_feature order(20,21): note = DNA
  misc_feature 1..21: note = Synthetic oligonucleotide
  source 1..21: mol_type = other RNA
cttgggcaatgtgactgcttt

SEQ ID NO: 501 - RNA, 21 nt, synthetic construct
  modified_base 20..21: mod_base = OTHER; note = thymine
  misc_feature order(1,2,3,4,5,6,7,8,9,10,11,12,13,14,15,16,17,18,19): note = RNA
  misc_feature order(20,21): note = DNA
  misc_feature 1..21: note = Synthetic oligonucleotide
  source 1..21: mol_type = other RNA
tgggcaatgtgactgctgatt

SEQ ID NO: 502 - RNA, 21 nt, synthetic construct
  modified_base 20..21: mod_base = OTHER; note = thymine
  misc_feature order(1,2,3,4,5,6,7,8,9,10,11,12,13,14,15,16,17,18,19): note = RNA
  misc_feature order(20,21): note = DNA
  misc_feature 1..21: note = Synthetic oligonucleotide
  source 1..21: mol_type = other RNA
ggcaatgtgactgctgacatt

SEQ ID NO: 503 - RNA, 21 nt, synthetic construct
  modified_base 20..21: mod_base = OTHER; note = thymine
  misc_feature order(1,2,3,4,5,6,7,8,9,10,11,12,13,14,15,16,17,18,19): note = RNA
  misc_feature order(20,21): note = DNA
  misc_feature 1..21: note = Synthetic oligonucleotide
  source 1..21: mol_type = other RNA
gcaatgtgactgctgacaatt

SEQ ID NO: 504 - RNA, 21 nt, synthetic construct
  modified_base 20..21: mod_base = OTHER; note = thymine
  misc_feature order(1,2,3,4,5,6,7,8,9,10,11,12,13,14,15,16,17,18,19): note = RNA
  misc_feature order(20,21): note = DNA
  misc_feature 1..21: note = Synthetic oligonucleotide
  source 1..21: mol_type = other RNA
caatgtgactgctgacaaatt

SEQ ID NO: 505 - RNA, 21 nt, synthetic construct
  modified_base 20..21: mod_base = OTHER; note = thymine
  misc_feature order(1,2,3,4,5,6,7,8,9,10,11,12,13,14,15,16,17,18,19): note = RNA
  misc_feature order(20,21): note = DNA
  misc_feature 1..21: note = Synthetic oligonucleotide
  source 1..21: mol_type = other RNA
atgtgactgctgacaaagatt

SEQ ID NO: 506 - RNA, 21 nt, synthetic construct
  modified_base 20..21: mod_base = OTHER; note = thymine
  misc_feature order(1,2,3,4,5,6,7,8,9,10,11,12,13,14,15,16,17,18,19): note = RNA
  misc_feature order(20,21): note = DNA
  misc_feature 1..21: note = Synthetic oligonucleotide
  source 1..21: mol_type = other RNA
tgtgactgctgacaaagattt

SEQ ID NO: 507 - RNA, 21 nt, synthetic construct
  modified_base 20..21: mod_base = OTHER; note = thymine
  misc_feature order(1,2,3,4,5,6,7,8,9,10,11,12,13,14,15,16,17,18,19): note = RNA
  misc_feature order(20,21): note = DNA
  misc_feature 1..21: note = Synthetic oligonucleotide
  source 1..21: mol_type = other RNA
gtgactgctgacaaagatgtt

SEQ ID NO: 508 - RNA, 21 nt, synthetic construct
  modified_base 20..21: mod_base = OTHER; note = thymine
  misc_feature order(1,2,3,4,5,6,7,8,9,10,11,12,13,14,15,16,17,18,19): note = RNA
  misc_feature order(20,21): note = DNA
  misc_feature 1..21: note = Synthetic oligonucleotide
  source 1..21: mol_type = other RNA
tgactgctgacaaagatgctt

SEQ ID NO: 509 - RNA, 21 nt, synthetic construct
  modified_base 20..21: mod_base = OTHER; note = thymine
  misc_feature order(1,2,3,4,5,6,7,8,9,10,11,12,13,14,15,16,17,18,19): note = RNA
  misc_feature order(20,21): note = DNA
  misc_feature 1..21: note = Synthetic oligonucleotide
  source 1..21: mol_type = other RNA
gactgctgacaaagatgcttt

SEQ ID NO: 510 - RNA, 21 nt, synthetic construct
  modified_base 20..21: mod_base = OTHER; note = thymine
  misc_feature order(1,2,3,4,5,6,7,8,9,10,11,12,13,14,15,16,17,18,19): note = RNA
  misc_feature order(20,21): note = DNA
  misc_feature 1..21: note = Synthetic oligonucleotide
  source 1..21: mol_type = other RNA
ctgctgacaaagatgctgttt

SEQ ID NO: 511 - RNA, 21 nt, synthetic construct
  modified_base 20..21: mod_base = OTHER; note = thymine
  misc_feature order(1,2,3,4,5,6,7,8,9,10,11,12,13,14,15,16,17,18,19): note = RNA
  misc_feature order(20,21): note = DNA
  misc_feature 1..21: note = Synthetic oligonucleotide
  source 1..21: mol_type = other RNA
tgacaaagatgctgtggcctt

SEQ ID NO: 512 - RNA, 21 nt, synthetic construct
  modified_base 20..21: mod_base = OTHER; note = thymine
  misc_feature order(1,2,3,4,5,6,7,8,9,10,11,12,13,14,15,16,17,18,19): note = RNA
  misc_feature order(20,21): note = DNA
  misc_feature 1..21: note = Synthetic oligonucleotide
  source 1..21: mol_type = other RNA
acaaagatgctgtggccgatt

SEQ ID NO: 513 - RNA, 21 nt, synthetic construct
  modified_base 20..21: mod_base = OTHER; note = thymine
  misc_feature order(1,2,3,4,5,6,7,8,9,10,11,12,13,14,15,16,17,18,19): note = RNA
  misc_feature order(20,21): note = DNA
  misc_feature 1..21: note = Synthetic oligonucleotide
  source 1..21: mol_type = other RNA
caaagatgctgtggccgattt

SEQ ID NO: 514 - RNA, 21 nt, synthetic construct
  modified_base 20..21: mod_base = OTHER; note = thymine
  misc_feature order(1,2,3,4,5,6,7,8,9,10,11,12,13,14,15,16,17,18,19): note = RNA
  misc_feature order(20,21): note = DNA
  misc_feature 1..21: note = Synthetic oligonucleotide
  source 1..21: mol_type = other RNA
aagatgctgtggccgatgttt

SEQ ID NO: 515 - RNA, 21 nt, synthetic construct
  modified_base 20..21: mod_base = OTHER; note = thymine
  misc_feature order(1,2,3,4,5,6,7,8,9,10,11,12,13,14,15,16,17,18,19): note = RNA
  misc_feature order(20,21): note = DNA
  misc_feature 1..21: note = Synthetic oligonucleotide
  source 1..21: mol_type = other RNA
agatgctgtggccgatgtgtt

SEQ ID NO: 516 - RNA, 21 nt, synthetic construct
  modified_base 20..21: mod_base = OTHER; note = thymine
  misc_feature order(1,2,3,4,5,6,7,8,9,10,11,12,13,14,15,16,17,18,19): note = RNA
  misc_feature order(20,21): note = DNA
  misc_feature 1..21: note = Synthetic oligonucleotide
  source 1..21: mol_type = other RNA
tgctgtggccgatgtgtcttt

SEQ ID NO: 517 - RNA, 21 nt, synthetic construct
  modified_base 20..21: mod_base = OTHER; note = thymine
  misc_feature order(1,2,3,4,5,6,7,8,9,10,11,12,13,14,15,16,17,18,19): note = RNA
  misc_feature order(20,21): note = DNA
  misc_feature 1..21: note = Synthetic oligonucleotide
  source 1..21: mol_type = other RNA
gctgtggccgatgtgtctatt

SEQ ID NO: 518 - RNA, 21 nt, synthetic construct
  modified_base 20..21: mod_base = OTHER; note = thymine
  misc_feature order(1,2,3,4,5,6,7,8,9,10,11,12,13,14,15,16,17,18,19): note = RNA
  misc_feature order(20,21): note = DNA
  misc_feature 1..21: note = Synthetic oligonucleotide
  source 1..21: mol_type = other RNA
ctgtggccgatgtgtctattt

SEQ ID NO: 519 - RNA, 21 nt, synthetic construct
  modified_base 20..21: mod_base = OTHER; note = thymine
  misc_feature order(1,2,3,4,5,6,7,8,9,10,11,12,13,14,15,16,17,18,19): note = RNA
  misc_feature order(20,21): note = DNA
  misc_feature 1..21: note = Synthetic oligonucleotide
  source 1..21: mol_type = other RNA
tgtggccgatgtgtctatttt

SEQ ID NO: 520 - RNA, 21 nt, synthetic construct
  modified_base 20..21: mod_base = OTHER; note = thymine
  misc_feature order(1,2,3,4,5,6,7,8,9,10,11,12,13,14,15,16,17,18,19): note = RNA
  misc_feature order(20,21): note = DNA
  misc_feature 1..21: note = Synthetic oligonucleotide
  source 1..21: mol_type = other RNA
gtggccgatgtgtctattgtt

SEQ ID NO: 521 - RNA, 21 nt, synthetic construct
  modified_base 20..21: mod_base = OTHER; note = thymine
  misc_feature order(1,2,3,4,5,6,7,8,9,10,11,12,13,14,15,16,17,18,19): note = RNA
  misc_feature order(20,21): note = DNA
  misc_feature 1..21: note = Synthetic oligonucleotide
  source 1..21: mol_type = other RNA
tggccgatgtgtctattgatt

SEQ ID NO: 522 - RNA, 21 nt, synthetic construct
  modified_base 20..21: mod_base = OTHER; note = thymine
  misc_feature order(1,2,3,4,5,6,7,8,9,10,11,12,13,14,15,16,17,18,19): note = RNA
  misc_feature order(20,21): note = DNA
  misc_feature 1..21: note = Synthetic oligonucleotide
  source 1..21: mol_type = other RNA
ggccgatgtgtctattgaatt

SEQ ID NO: 523 - RNA, 21 nt, synthetic construct
  modified_base 20..21: mod_base = OTHER; note = thymine
  misc_feature order(1,2,3,4,5,6,7,8,9,10,11,12,13,14,15,16,17,18,19): note = RNA
  misc_feature order(20,21): note = DNA
  misc_feature 1..21: note = Synthetic oligonucleotide
  source 1..21: mol_type = other RNA
gccgatgtgtctattgaagtt

SEQ ID NO: 524 - RNA, 21 nt, synthetic construct
  modified_base 20..21: mod_base = OTHER; note = thymine
  misc_feature order(1,2,3,4,5,6,7,8,9,10,11,12,13,14,15,16,17,18,19): note = RNA
  misc_feature order(20,21): note = DNA
  misc_feature 1..21: note = Synthetic oligonucleotide
  source 1..21: mol_type = other RNA
ccgatgtgtctattgaagatt

SEQ ID NO: 525 - RNA, 21 nt, synthetic construct
  modified_base 20..21: mod_base = OTHER; note = thymine
  misc_feature order(1,2,3,4,5,6,7,8,9,10,11,12,13,14,15,16,17,18,19): note = RNA
  misc_feature order(20,21): note = DNA
  misc_feature 1..21: note = Synthetic oligonucleotide
  source 1..21: mol_type = other RNA
cgatgtgtctattgaagattt

SEQ ID NO: 526 - RNA, 21 nt, synthetic construct
  modified_base 20..21: mod_base = OTHER; note = thymine
  misc_feature order(1,2,3,4,5,6,7,8,9,10,11,12,13,14,15,16,17,18,19): note = RNA
  misc_feature order(20,21): note = DNA
  misc_feature 1..21: note = Synthetic oligonucleotide
  source 1..21: mol_type = other RNA
ttgaagattctgtgatctctt

SEQ ID NO: 527 - RNA, 21 nt, synthetic construct
  modified_base 20..21: mod_base = OTHER; note = thymine
  misc_feature order(1,2,3,4,5,6,7,8,9,10,11,12,13,14,15,16,17,18,19): note = RNA
  misc_feature order(20,21): note = DNA
  misc_feature 1..21: note = Synthetic oligonucleotide
  source 1..21: mol_type = other RNA
tgaagattctgtgatctcatt

SEQ ID NO: 528 - RNA, 21 nt, synthetic construct
  modified_base 20..21: mod_base = OTHER; note = thymine
  misc_feature order(1,2,3,4,5,6,7,8,9,10,11,12,13,14,15,16,17,18,19): note = RNA
  misc_feature order(20,21): note = DNA
  misc_feature 1..21: note = Synthetic oligonucleotide
  source 1..21: mol_type = other RNA
gaagattctgtgatctcactt

SEQ ID NO: 529 - RNA, 21 nt, synthetic construct
  modified_base 20..21: mod_base = OTHER; note = thymine
  misc_feature order(1,2,3,4,5,6,7,8,9,10,11,12,13,14,15,16,17,18,19): note = RNA
  misc_feature order(20,21): note = DNA
  misc_feature 1..21: note = Synthetic oligonucleotide
  source 1..21: mol_type = other RNA
aagattctgtgatctcacttt

SEQ ID NO: 530 - RNA, 21 nt, synthetic construct
  modified_base 20..21: mod_base = OTHER; note = thymine
  misc_feature order(1,2,3,4,5,6,7,8,9,10,11,12,13,14,15,16,17,18,19): note = RNA
  misc_feature order(20,21): note = DNA
  misc_feature 1..21: note = Synthetic oligonucleotide
  source 1..21: mol_type = other RNA
agattctgtgatctcactctt

SEQ ID NO: 531 - RNA, 21 nt, synthetic construct
  modified_base 20..21: mod_base = OTHER; note = thymine
  misc_feature order(1,2,3,4,5,6,7,8,9,10,11,12,13,14,15,16,17,18,19): note = RNA
  misc_feature order(20,21): note = DNA
  misc_feature 1..21: note = Synthetic oligonucleotide
  source 1..21: mol_type = other RNA
gattctgtgatctcactcttt

SEQ ID NO: 532 - RNA, 21 nt, synthetic construct
  modified_base 20..21: mod_base = OTHER; note = thymine
  misc_feature order(1,2,3,4,5,6,7,8,9,10,11,12,13,14,15,16,17,18,19): note = RNA
  misc_feature order(20,21): note = DNA
  misc_feature 1..21: note = Synthetic oligonucleotide
  source 1..21: mol_type = other RNA
attctgtgatctcactctctt

SEQ ID NO: 533 - RNA, 21 nt, synthetic construct
  modified_base 20..21: mod_base = OTHER; note = thymine
  misc_feature order(1,2,3,4,5,6,7,8,9,10,11,12,13,14,15,16,17,18,19): note = RNA
  misc_feature order(20,21): note = DNA
  misc_feature 1..21: note = Synthetic oligonucleotide
  source 1..21: mol_type = other RNA
ttctgtgatctcactctcatt

SEQ ID NO: 534 - RNA, 21 nt, synthetic construct
  modified_base 20..21: mod_base = OTHER; note = thymine
  misc_feature order(1,2,3,4,5,6,7,8,9,10,11,12,13,14,15,16,17,18,19): note = RNA
  misc_feature order(20,21): note = DNA
  misc_feature 1..21: note = Synthetic oligonucleotide
  source 1..21: mol_type = other RNA
tctgtgatctcactctcagtt

SEQ ID NO: 535 - RNA, 21 nt, synthetic construct
  modified_base 20..21: mod_base = OTHER; note = thymine
  misc_feature order(1,2,3,4,5,6,7,8,9,10,11,12,13,14,15,16,17,18,19): note = RNA
  misc_feature order(20,21): note = DNA
  misc_feature 1..21: note = Synthetic oligonucleotide
  source 1..21: mol_type = other RNA
tgtgatctcactctcaggatt

SEQ ID NO: 536 - RNA, 21 nt, synthetic construct
  modified_base 20..21: mod_base = OTHER; note = thymine
  misc_feature order(1,2,3,4,5,6,7,8,9,10,11,12,13,14,15,16,17,18,19): note = RNA
  misc_feature order(20,21): note = DNA
  misc_feature 1..21: note = Synthetic oligonucleotide
  source 1..21: mol_type = other RNA
tgatctcactctcaggagatt

SEQ ID NO: 537 - RNA, 21 nt, synthetic construct
  modified_base 20..21: mod_base = OTHER; note = thymine
  misc_feature order(1,2,3,4,5,6,7,8,9,10,11,12,13,14,15,16,17,18,19): note = RNA
  misc_feature order(20,21): note = DNA
  misc_feature 1..21: note = Synthetic oligonucleotide
  source 1..21: mol_type = other RNA
tctcactctcaggagaccatt

SEQ ID NO: 538 - RNA, 21 nt, synthetic construct
  modified_base 20..21: mod_base = OTHER; note = thymine
  misc_feature order(1,2,3,4,5,6,7,8,9,10,11,12,13,14,15,16,17,18,19): note = RNA
  misc_feature order(20,21): note = DNA
  misc_feature 1..21: note = Synthetic oligonucleotide
  source 1..21: mol_type = other RNA
ctcactctcaggagaccattt

SEQ ID NO: 539 - RNA, 21 nt, synthetic construct
  modified_base 20..21: mod_base = OTHER; note = thymine
  misc_feature order(1,2,3,4,5,6,7,8,9,10,11,12,13,14,15,16,17,18,19): note = RNA
  misc_feature order(20,21): note = DNA
  misc_feature 1..21: note = Synthetic oligonucleotide
  source 1..21: mol_type = other RNA
tcactctcaggagaccatttt

SEQ ID NO: 540 - RNA, 21 nt, synthetic construct
  modified_base 20..21: mod_base = OTHER; note = thymine
  misc_feature order(1,2,3,4,5,6,7,8,9,10,11,12,13,14,15,16,17,18,19): note = RNA
  misc_feature order(20,21): note = DNA
  misc_feature 1..21: note = Synthetic oligonucleotide
  source 1..21: mol_type = other RNA
cactctcaggagaccattgtt

SEQ ID NO: 541 - RNA, 21 nt, synthetic construct
  modified_base 20..21: mod_base = OTHER; note = thymine
  misc_feature order(1,2,3,4,5,6,7,8,9,10,11,12,13,14,15,16,17,18,19): note = RNA
  misc_feature order(20,21): note = DNA
  misc_feature 1..21: note = Synthetic oligonucleotide
  source 1..21: mol_type = other RNA
actctcaggagaccattgctt

SEQ ID NO: 542 - RNA, 21 nt, synthetic construct
  modified_base 20..21: mod_base = OTHER; note = thymine
  misc_feature order(1,2,3,4,5,6,7,8,9,10,11,12,13,14,15,16,17,18,19): note = RNA
  misc_feature order(20,21): note = DNA
  misc_feature 1..21: note = Synthetic oligonucleotide
  source 1..21: mol_type = other RNA
ctctcaggagaccattgcatt

SEQ ID NO: 543 - RNA, 21 nt, synthetic construct
  modified_base 20..21: mod_base = OTHER; note = thymine
  misc_feature order(1,2,3,4,5,6,7,8,9,10,11,12,13,14,15,16,17,18,19): note = RNA
  misc_feature order(20,21): note = DNA
  misc_feature 1..21: note = Synthetic oligonucleotide
  source 1..21: mol_type = other RNA
tctcaggagaccattgcattt

SEQ ID NO: 544 - RNA, 21 nt, synthetic construct
  modified_base 20..21: mod_base = OTHER; note = thymine
  misc_feature order(1,2,3,4,5,6,7,8,9,10,11,12,13,14,15,16,17,18,19): note = RNA
  misc_feature order(20,21): note = DNA
  misc_feature 1..21: note = Synthetic oligonucleotide
  source 1..21: mol_type = other RNA
tcaggagaccattgcatcatt

SEQ ID NO: 545 - RNA, 21 nt, synthetic construct
  modified_base 20..21: mod_base = OTHER; note = thymine
  misc_feature order(1,2,3,4,5,6,7,8,9,10,11,12,13,14,15,16,17,18,19): note = RNA
  misc_feature order(20,21): note = DNA
  misc_feature 1..21: note = Synthetic oligonucleotide
  source 1..21: mol_type = other RNA
caggagaccattgcatcattt

SEQ ID NO: 546 - RNA, 21 nt, synthetic construct
  modified_base 20..21: mod_base = OTHER; note = thymine
  misc_feature order(1,2,3,4,5,6,7,8,9,10,11,12,13,14,15,16,17,18,19): note = RNA
  misc_feature order(20,21): note = DNA
  misc_feature 1..21: note = Synthetic oligonucleotide
  source 1..21: mol_type = other RNA
aggagaccattgcatcatttt

SEQ ID NO: 547 - RNA, 21 nt, synthetic construct
  modified_base 20..21: mod_base = OTHER; note = thymine
  misc_feature order(1,2,3,4,5,6,7,8,9,10,11,12,13,14,15,16,17,18,19): note = RNA
  misc_feature order(20,21): note = DNA
  misc_feature 1..21: note = Synthetic oligonucleotide
  source 1..21: mol_type = other RNA
ggagaccattgcatcattgtt

SEQ ID NO: 548 - RNA, 21 nt, synthetic construct
  modified_base 20..21: mod_base = OTHER; note = thymine
  misc_feature order(1,2,3,4,5,6,7,8,9,10,11,12,13,14,15,16,17,18,19): note = RNA
  misc_feature order(20,21): note = DNA
  misc_feature 1..21: note = Synthetic oligonucleotide
  source 1..21: mol_type = other RNA
gagaccattgcatcattggtt

SEQ ID NO: 549 - RNA, 21 nt, synthetic construct
  modified_base 20..21: mod_base = OTHER; note = thymine
  misc_feature order(1,2,3,4,5,6,7,8,9,10,11,12,13,14,15,16,17,18,19): note = RNA
  misc_feature order(20,21): note = DNA
  misc_feature 1..21: note = Synthetic oligonucleotide
  source 1..21: mol_type = other RNA
agaccattgcatcattggctt

SEQ ID NO: 550 - RNA, 21 nt, synthetic construct
  modified_base 20..21: mod_base = OTHER; note = thymine
  misc_feature order(1,2,3,4,5,6,7,8,9,10,11,12,13,14,15,16,17,18,19): note = RNA
  misc_feature order(20,21): note = DNA
  misc_feature 1..21: note = Synthetic oligonucleotide
  source 1..21: mol_type = other RNA
ttgcatcattggccgcacatt

SEQ ID NO: 551 - RNA, 21 nt, synthetic construct
  modified_base 20..21: mod_base = OTHER; note = thymine
  misc_feature order(1,2,3,4,5,6,7,8,9,10,11,12,13,14,15,16,17,18,19): note = RNA
  misc_feature order(20,21): note = DNA
  misc_feature 1..21: note = Synthetic oligonucleotide
  source 1..21: mol_type = other RNA
gcatcattggccgcacacttt

SEQ ID NO: 552 - RNA, 21 nt, synthetic construct
  modified_base 20..21: mod_base = OTHER; note = thymine
  misc_feature order(1,2,3,4,5,6,7,8,9,10,11,12,13,14,15,16,17,18,19): note = RNA
  misc_feature order(20,21): note = DNA
  misc_feature 1..21: note = Synthetic oligonucleotide
  source 1..21: mol_type = other RNA
tcattggccgcacactggttt

SEQ ID NO: 553 - RNA, 21 nt, synthetic construct
  modified_base 20..21: mod_base = OTHER; note = thymine
  misc_feature order(1,2,3,4,5,6,7,8,9,10,11,12,13,14,15,16,17,18,19): note = RNA
  misc_feature order(20,21): note = DNA
  misc_feature 1..21: note = Synthetic oligonucleotide
  source 1..21: mol_type = other RNA
gccgcacactggtggtccatt

SEQ ID NO: 554 - RNA, 21 nt, synthetic construct
  modified_base 20..21: mod_base = OTHER; note = thymine
  misc_feature order(1,2,3,4,5,6,7,8,9,10,11,12,13,14,15,16,17,18,19): note = RNA
  misc_feature order(20,21): note = DNA
  misc_feature 1..21: note = Synthetic oligonucleotide
  source 1..21: mol_type = other RNA
gcacactggtggtccatgatt

SEQ ID NO: 555 - RNA, 21 nt, synthetic construct
  modified_base 20..21: mod_base = OTHER; note = thymine
  misc_feature order(1,2,3,4,5,6,7,8,9,10,11,12,13,14,15,16,17,18,19): note = RNA
  misc_feature order(20,21): note = DNA
  misc_feature 1..21: note = Synthetic oligonucleotide
  source 1..21: mol_type = other RNA
cacactggtggtccatgaatt

SEQ ID NO: 556 - RNA, 21 nt, synthetic construct
  modified_base 20..21: mod_base = OTHER; note = thymine
  misc_feature order(1,2,3,4,5,6,7,8,9,10,11,12,13,14,15,16,17,18,19): note = RNA
  misc_feature order(20,21): note = DNA
  misc_feature 1..21: note = Synthetic oligonucleotide
  source 1..21: mol_type = other RNA
acactggtggtccatgaaatt

SEQ ID NO: 557 - RNA, 21 nt, synthetic construct
  modified_base 20..21: mod_base = OTHER; note = thymine
  misc_feature order(1,2,3,4,5,6,7,8,9,10,11,12,13,14,15,16,17,18,19): note = RNA
  misc_feature order(20,21): note = DNA
  misc_feature 1..21: note = Synthetic oligonucleotide
  source 1..21: mol_type = other RNA
cactggtggtccatgaaaatt

SEQ ID NO: 558 - RNA, 21 nt, synthetic construct
  modified_base 20..21: mod_base = OTHER; note = thymine
  misc_feature order(1,2,3,4,5,6,7,8,9,10,11,12,13,14,15,16,17,18,19): note = RNA
  misc_feature order(20,21): note = DNA
  misc_feature 1..21: note = Synthetic oligonucleotide
  source 1..21: mol_type = other RNA
actggtggtccatgaaaaatt

SEQ ID NO: 559 - RNA, 21 nt, synthetic construct
  modified_base 20..21: mod_base = OTHER; note = thymine
  misc_feature order(1,2,3,4,5,6,7,8,9,10,11,12,13,14,15,16,17,18,19): note = RNA
  misc_feature order(20,21): note = DNA
  misc_feature 1..21: note = Synthetic oligonucleotide
  source 1..21: mol_type = other RNA
ctggtggtccatgaaaaagtt

SEQ ID NO: 560 - RNA, 21 nt, synthetic construct
  modified_base 20..21: mod_base = OTHER; note = thymine
  misc_feature order(1,2,3,4,5,6,7,8,9,10,11,12,13,14,15,16,17,18,19): note = RNA
  misc_feature order(20,21): note = DNA
  misc_feature 1..21: note = Synthetic oligonucleotide
  source 1..21: mol_type = other RNA
tggtggtccatgaaaaagctt

SEQ ID NO: 561 - RNA, 21 nt, synthetic construct
  modified_base 20..21: mod_base = OTHER; note = thymine
  misc_feature order(1,2,3,4,5,6,7,8,9,10,11,12,13,14,15,16,17,18,19): note = RNA
  misc_feature order(20,21): note = DNA
  misc_feature 1..21: note = Synthetic oligonucleotide
  source 1..21: mol_type = other RNA
ggtggtccatgaaaaagcatt

SEQ ID NO: 562 - RNA, 21 nt, synthetic construct
  modified_base 20..21: mod_base = OTHER; note = thymine
  misc_feature order(1,2,3,4,5,6,7,8,9,10,11,12,13,14,15,16,17,18,19): note = RNA
  misc_feature order(20,21): note = DNA
  misc_feature 1..21: note = Synthetic oligonucleotide
  source 1..21: mol_type = other RNA
tggtccatgaaaaagcagatt

SEQ ID NO: 563 - RNA, 21 nt, synthetic construct
  modified_base 20..21: mod_base = OTHER; note = thymine
  misc_feature order(1,2,3,4,5,6,7,8,9,10,11,12,13,14,15,16,17,18,19): note = RNA
  misc_feature order(20,21): note = DNA
  misc_feature 1..21: note = Synthetic oligonucleotide
  source 1..21: mol_type = other RNA
ggtccatgaaaaagcagattt

SEQ ID NO: 564 - RNA, 21 nt, synthetic construct
  modified_base 20..21: mod_base = OTHER; note = thymine
  misc_feature order(1,2,3,4,5,6,7,8,9,10,11,12,13,14,15,16,17,18,19): note = RNA
  misc_feature order(20,21): note = DNA
  misc_feature 1..21: note = Synthetic oligonucleotide
  source 1..21: mol_type = other RNA
tccatgaaaaagcagatgatt

SEQ ID NO: 565 - RNA, 21 nt, synthetic construct
  modified_base 20..21: mod_base = OTHER; note = thymine
  misc_feature order(1,2,3,4,5,6,7,8,9,10,11,12,13,14,15,16,17,18,19): note = RNA
  misc_feature order(20,21): note = DNA
  misc_feature 1..21: note = Synthetic oligonucleotide
  source 1..21: mol_type = other RNA
ccatgaaaaagcagatgactt

SEQ ID NO: 566 - RNA, 21 nt, synthetic construct
  modified_base 20..21: mod_base = OTHER; note = thymine
  misc_feature order(1,2,3,4,5,6,7,8,9,10,11,12,13,14,15,16,17,18,19): note = RNA
  misc_feature order(20,21): note = DNA
  misc_feature 1..21: note = Synthetic oligonucleotide
  source 1..21: mol_type = other RNA
catgaaaaagcagatgacttt

SEQ ID NO: 567 - RNA, 21 nt, synthetic construct
  modified_base 20..21: mod_base = OTHER; note = thymine
  misc_feature order(1,2,3,4,5,6,7,8,9,10,11,12,13,14,15,16,17,18,19): note = RNA
  misc_feature order(20,21): note = DNA
  misc_feature 1..21: note = Synthetic oligonucleotide
  source 1..21: mol_type = other RNA
tgaaaaagcagatgacttgtt

SEQ ID NO: 568 - RNA, 21 nt, synthetic construct
  modified_base 20..21: mod_base = OTHER; note = thymine
  misc_feature order(1,2,3,4,5,6,7,8,9,10,11,12,13,14,15,16,17,18,19): note = RNA
  misc_feature order(20,21): note = DNA
  misc_feature 1..21: note = Synthetic oligonucleotide
  source 1..21: mol_type = other RNA
aaaaagcagatgacttgggtt

SEQ ID NO: 569 - RNA, 21 nt, synthetic construct
  modified_base 20..21: mod_base = OTHER; note = thymine
  misc_feature order(1,2,3,4,5,6,7,8,9,10,11,12,13,14,15,16,17,18,19): note = RNA
  misc_feature order(20,21): note = DNA
  misc_feature 1..21: note = Synthetic oligonucleotide
  source 1..21: mol_type = other RNA
aaaagcagatgacttgggctt

SEQ ID NO: 570 - RNA, 21 nt, synthetic construct
  modified_base 20..21: mod_base = OTHER; note = thymine
  misc_feature order(1,2,3,4,5,6,7,8,9,10,11,12,13,14,15,16,17,18,19): note = RNA
  misc_feature order(20,21): note = DNA
  misc_feature 1..21: note = Synthetic oligonucleotide
  source 1..21: mol_type = other RNA
aaagcagatgacttgggcatt

SEQ ID NO: 571 - RNA, 21 nt, synthetic construct
  modified_base 20..21: mod_base = OTHER; note = thymine
  misc_feature order(1,2,3,4,5,6,7,8,9,10,11,12,13,14,15,16,17,18,19): note = RNA
  misc_feature order(20,21): note = DNA
  misc_feature 1..21: note = Synthetic oligonucleotide
  source 1..21: mol_type = other RNA
aagcagatgacttgggcaatt

SEQ ID NO: 572 - RNA, 21 nt, synthetic construct
  modified_base 20..21: mod_base = OTHER; note = thymine
  misc_feature order(1,2,3,4,5,6,7,8,9,10,11,12,13,14,15,16,17,18,19): note = RNA
  misc_feature order(20,21): note = DNA
  misc_feature 1..21: note = Synthetic oligonucleotide
  source 1..21: mol_type = other RNA
agcagatgacttgggcaaatt

SEQ ID NO: 573 - RNA, 21 nt, synthetic construct
  modified_base 20..21: mod_base = OTHER; note = thymine
  misc_feature order(1,2,3,4,5,6,7,8,9,10,11,12,13,14,15,16,17,18,19): note = RNA
  misc_feature order(20,21): note = DNA
  misc_feature 1..21: note = Synthetic oligonucleotide
  source 1..21: mol_type = other RNA
gcagatgacttgggcaaagtt

SEQ ID NO: 574 - RNA, 21 nt, synthetic construct
  modified_base 20..21: mod_base = OTHER; note = thymine
  misc_feature order(1,2,3,4,5,6,7,8,9,10,11,12,13,14,15,16,17,18,19): note = RNA
  misc_feature order(20,21): note = DNA
  misc_feature 1..21: note = Synthetic oligonucleotide
  source 1..21: mol_type = other RNA
cagatgacttgggcaaaggtt

SEQ ID NO: 575 - RNA, 21 nt, synthetic construct
  modified_base 20..21: mod_base = OTHER; note = thymine
  misc_feature order(1,2,3,4,5,6,7,8,9,10,11,12,13,14,15,16,17,18,19): note = RNA
  misc_feature order(20,21): note = DNA
  misc_feature 1..21: note = Synthetic oligonucleotide
  source 1..21: mol_type = other RNA
agatgacttgggcaaaggttt

SEQ ID NO: 576 - RNA, 21 nt, synthetic construct
  modified_base 20..21: mod_base = OTHER; note = thymine
  misc_feature order(1,2,3,4,5,6,7,8,9,10,11,12,13,14,15,16,17,18,19): note = RNA
  misc_feature order(20,21): note = DNA
  misc_feature 1..21: note = Synthetic oligonucleotide
  source 1..21: mol_type = other RNA
tgacttgggcaaaggtggatt

SEQ ID NO: 577 - RNA, 21 nt, synthetic construct
  modified_base 20..21: mod_base = OTHER; note = thymine
  misc_feature order(1,2,3,4,5,6,7,8,9,10,11,12,13,14,15,16,17,18,19): note = RNA
  misc_feature order(20,21): note = DNA
  misc_feature 1..21: note = Synthetic oligonucleotide
  source 1..21: mol_type = other RNA
gacttgggcaaaggtggaatt

SEQ ID NO: 578 - RNA, 21 nt, synthetic construct
  modified_base 20..21: mod_base = OTHER; note = thymine
  misc_feature order(1,2,3,4,5,6,7,8,9,10,11,12,13,14,15,16,17,18,19): note = RNA
  misc_feature order(20,21): note = DNA
  misc_feature 1..21: note = Synthetic oligonucleotide
  source 1..21: mol_type = other RNA
acttgggcaaaggtggaaatt

SEQ ID NO: 579 - RNA, 21 nt, synthetic construct
  modified_base 20..21: mod_base = OTHER; note = thymine
  misc_feature order(1,2,3,4,5,6,7,8,9,10,11,12,13,14,15,16,17,18,19): note = RNA
  misc_feature order(20,21): note = DNA
  misc_feature 1..21: note = Synthetic oligonucleotide
  source 1..21: mol_type = other RNA
cttgggcaaaggtggaaattt

SEQ ID NO: 580 - RNA, 21 nt, synthetic construct
  modified_base 20..21: mod_base = OTHER; note = thymine
  misc_feature order(1,2,3,4,5,6,7,8,9,10,11,12,13,14,15,16,17,18,19): note = RNA
  misc_feature order(20,21): note = DNA
  misc_feature 1..21: note = Synthetic oligonucleotide
  source 1..21: mol_type = other RNA
ttgggcaaaggtggaaatgtt

SEQ ID NO: 581 - RNA, 21 nt, synthetic construct
  modified_base 20..21: mod_base = OTHER; note = thymine
  misc_feature order(1,2,3,4,5,6,7,8,9,10,11,12,13,14,15,16,17,18,19): note = RNA
  misc_feature order(20,21): note = DNA
  misc_feature 1..21: note = Synthetic oligonucleotide
  source 1..21: mol_type = other RNA
tgggcaaaggtggaaatgatt

SEQ ID NO: 582 - RNA, 21 nt, synthetic construct
  modified_base 20..21: mod_base = OTHER; note = thymine
  misc_feature order(1,2,3,4,5,6,7,8,9,10,11,12,13,14,15,16,17,18,19): note = RNA
  misc_feature order(20,21): note = DNA
  misc_feature 1..21: note = Synthetic oligonucleotide
  source 1..21: mol_type = other RNA
gggcaaaggtggaaatgaatt

SEQ ID NO: 583 - RNA, 21 nt, synthetic construct
  modified_base 20..21: mod_base = OTHER; note = thymine
  misc_feature order(1,2,3,4,5,6,7,8,9,10,11,12,13,14,15,16,17,18,19): note = RNA
  misc_feature order(20,21): note = DNA
  misc_feature 1..21: note = Synthetic oligonucleotide
  source 1..21: mol_type = other RNA
ggcaaaggtggaaatgaagtt

SEQ ID NO: 584 - RNA, 21 nt, synthetic construct
  modified_base 20..21: mod_base = OTHER; note = thymine
  misc_feature order(1,2,3,4,5,6,7,8,9,10,11,12,13,14,15,16,17,18,19): note = RNA
  misc_feature order(20,21): note = DNA
  misc_feature 1..21: note = Synthetic oligonucleotide
  source 1..21: mol_type = other RNA
gcaaaggtggaaatgaagatt

SEQ ID NO: 585 - RNA, 21 nt, synthetic construct
  modified_base 20..21: mod_base = OTHER; note = thymine
  misc_feature order(1,2,3,4,5,6,7,8,9,10,11,12,13,14,15,16,17,18,19): note = RNA
  misc_feature order(20,21): note = DNA
  misc_feature 1..21: note = Synthetic oligonucleotide
  source 1..21: mol_type = other RNA
caaaggtggaaatgaagaatt

SEQ ID NO: 586 - RNA, 21 nt, synthetic construct
  modified_base 20..21: mod_base = OTHER; note = thymine
  misc_feature order(1,2,3,4,5,6,7,8,9,10,11,12,13,14,15,16,17,18,19): note = RNA
  misc_feature order(20,21): note = DNA
  misc_feature 1..21: note = Synthetic oligonucleotide
  source 1..21: mol_type = other RNA
aaggtggaaatgaagaaagtt

SEQ ID NO: 587 - RNA, 21 nt, synthetic construct
  modified_base 20..21: mod_base = OTHER; note = thymine
  misc_feature order(1,2,3,4,5,6,7,8,9,10,11,12,13,14,15,16,17,18,19): note = RNA
  misc_feature order(20,21): note = DNA
  misc_feature 1..21: note = Synthetic oligonucleotide
  source 1..21: mol_type = other RNA
aggtggaaatgaagaaagttt

SEQ ID NO: 588 - RNA, 21 nt, synthetic construct
  modified_base 20..21: mod_base = OTHER; note = thymine
  misc_feature order(1,2,3,4,5,6,7,8,9,10,11,12,13,14,15,16,17,18,19): note = RNA
  misc_feature order(20,21): note = DNA
  misc_feature 1..21: note = Synthetic oligonucleotide
  source 1..21: mol_type = other RNA
ggtggaaatgaagaaagtatt

SEQ ID NO: 589 - RNA, 21 nt, synthetic construct
  modified_base 20..21: mod_base = OTHER; note = thymine
  misc_feature order(1,2,3,4,5,6,7,8,9,10,11,12,13,14,15,16,17,18,19): note = RNA
  misc_feature order(20,21): note = DNA
  misc_feature 1..21: note = Synthetic oligonucleotide
  source 1..21: mol_type = other RNA
gtggaaatgaagaaagtactt

SEQ ID NO: 590 - RNA, 21 nt, synthetic construct
  modified_base 20..21: mod_base = OTHER; note = thymine
  misc_feature order(1,2,3,4,5,6,7,8,9,10,11,12,13,14,15,16,17,18,19): note = RNA
  misc_feature order(20,21): note = DNA
  misc_feature 1..21: note = Synthetic oligonucleotide
  source 1..21: mol_type = other RNA
gaagaaagtacaaagacagtt

SEQ ID NO: 591 - RNA, 21 nt, synthetic construct
  modified_base 20..21: mod_base = OTHER; note = thymine
  misc_feature order(1,2,3,4,5,6,7,8,9,10,11,12,13,14,15,16,17,18,19): note = RNA
  misc_feature order(20,21): note = DNA
  misc_feature 1..21: note = Synthetic oligonucleotide
  source 1..21: mol_type = other RNA
agaaagtacaaagacaggatt

SEQ ID NO: 592 - RNA, 21 nt, synthetic construct
  modified_base 20..21: mod_base = OTHER; note = thymine
  misc_feature order(1,2,3,4,5,6,7,8,9,10,11,12,13,14,15,16,17,18,19): note = RNA
  misc_feature order(20,21): note = DNA
  misc_feature 1..21: note = Synthetic oligonucleotide
  source 1..21: mol_type = other RNA
gaaagtacaaagacaggaatt

SEQ ID NO: 593 - RNA, 21 nt, synthetic construct
  modified_base 20..21: mod_base = OTHER; note = thymine
  misc_feature order(1,2,3,4,5,6,7,8,9,10,11,12,13,14,15,16,17,18,19): note = RNA
  misc_feature order(20,21): note = DNA
  misc_feature 1..21: note = Synthetic oligonucleotide
  source 1..21: mol_type = other RNA
aagtacaaagacaggaaactt

SEQ ID NO: 594 - RNA, 21 nt, synthetic construct
  modified_base 20..21: mod_base = OTHER; note = thymine
  misc_feature order(1,2,3,4,5,6,7,8,9,10,11,12,13,14,15,16,17,18,19): note = RNA
  misc_feature order(20,21): note = DNA
  misc_feature 1..21: note = Synthetic oligonucleotide
  source 1..21: mol_type = other RNA
tacaaagacaggaaacgcttt

SEQ ID NO: 595 - RNA, 21 nt, synthetic construct
  modified_base 20..21: mod_base = OTHER; note = thymine
  misc_feature order(1,2,3,4,5,6,7,8,9,10,11,12,13,14,15,16,17,18,19): note = RNA
  misc_feature order(20,21): note = DNA
  misc_feature 1..21: note = Synthetic oligonucleotide
  source 1..21: mol_type = other RNA
aaagacaggaaacgctggatt

SEQ ID NO: 596 - RNA, 21 nt, synthetic construct
  modified_base 20..21: mod_base = OTHER; note = thymine
  misc_feature order(1,2,3,4,5,6,7,8,9,10,11,12,13,14,15,16,17,18,19): note = RNA
  misc_feature order(20,21): note = DNA
  misc_feature 1..21: note = Synthetic oligonucleotide
  source 1..21: mol_type = other RNA
aagacaggaaacgctggaatt

SEQ ID NO: 597 - RNA, 21 nt, synthetic construct
  modified_base 20..21: mod_base = OTHER; note = thymine
  misc_feature order(1,2,3,4,5,6,7,8,9,10,11,12,13,14,15,16,17,18,19): note = RNA
  misc_feature order(20,21): note = DNA
  misc_feature 1..21: note = Synthetic oligonucleotide
  source 1..21: mol_type = other RNA
agacaggaaacgctggaagtt

SEQ ID NO: 598 - RNA, 21 nt, synthetic construct
  modified_base 20..21: mod_base = OTHER; note = thymine
  misc_feature order(1,2,3,4,5,6,7,8,9,10,11,12,13,14,15,16,17,18,19): note = RNA
  misc_feature order(20,21): note = DNA
  misc_feature 1..21: note = Synthetic oligonucleotide
  source 1..21: mol_type = other RNA
gacaggaaacgctggaagttt

SEQ ID NO: 599 - RNA, 21 nt, synthetic construct
  modified_base 20..21: mod_base = OTHER; note = thymine
  misc_feature order(1,2,3,4,5,6,7,8,9,10,11,12,13,14,15,16,17,18,19): note = RNA
  misc_feature order(20,21): note = DNA
  misc_feature 1..21: note = Synthetic oligonucleotide
  source 1..21: mol_type = other RNA
acaggaaacgctggaagtctt

SEQ ID NO: 600 - RNA, 21 nt, synthetic construct
  modified_base 20..21: mod_base = OTHER; note = thymine
  misc_feature order(1,2,3,4,5,6,7,8,9,10,11,12,13,14,15,16,17,18,19): note = RNA
  misc_feature order(20,21): note = DNA
  misc_feature 1..21: note = Synthetic oligonucleotide
  source 1..21: mol_type = other RNA
aggaaacgctggaagtcgttt

SEQ ID NO: 601 - RNA, 21 nt, synthetic construct
  modified_base 20..21: mod_base = OTHER; note = thymine
  misc_feature order(1,2,3,4,5,6,7,8,9,10,11,12,13,14,15,16,17,18,19): note = RNA
  misc_feature order(20,21): note = DNA
  misc_feature 1..21: note = Synthetic oligonucleotide
  source 1..21: mol_type = other RNA
ggaaacgctggaagtcgtttt

SEQ ID NO: 602 - RNA, 21 nt, synthetic construct
  modified_base 20..21: mod_base = OTHER; note = thymine
  misc_feature order(1,2,3,4,5,6,7,8,9,10,11,12,13,14,15,16,17,18,19): note = RNA
  misc_feature order(20,21): note = DNA
  misc_feature 1..21: note = Synthetic oligonucleotide
  source 1..21: mol_type = other RNA
gaaacgctggaagtcgttttt

SEQ ID NO: 603 - RNA, 21 nt, synthetic construct
  modified_base 20..21: mod_base = OTHER; note = thymine
  misc_feature order(1,2,3,4,5,6,7,8,9,10,11,12,13,14,15,16,17,18,19): note = RNA
  misc_feature order(20,21): note = DNA
  misc_feature 1..21: note = Synthetic oligonucleotide
  source 1..21: mol_type = other RNA
aaacgctggaagtcgtttgtt

SEQ ID NO: 604 - RNA, 21 nt, synthetic construct
  modified_base 20..21: mod_base = OTHER; note = thymine
  misc_feature order(1,2,3,4,5,6,7,8,9,10,11,12,13,14,15,16,17,18,19): note = RNA
  misc_feature order(20,21): note = DNA
  misc_feature 1..21: note = Synthetic oligonucleotide
  source 1..21: mol_type = other RNA
aacgctggaagtcgtttggtt

SEQ ID NO: 605 - RNA, 21 nt, synthetic construct
  modified_base 20..21: mod_base = OTHER; note = thymine
  misc_feature order(1,2,3,4,5,6,7,8,9,10,11,12,13,14,15,16,17,18,19): note = RNA
  misc_feature order(20,21): note = DNA
  misc_feature 1..21: note = Synthetic oligonucleotide
  source 1..21: mol_type = other RNA
cgctggaagtcgtttggcttt

SEQ ID NO: 606 - RNA, 21 nt, synthetic construct
  modified_base 20..21: mod_base = OTHER; note = thymine
  misc_feature order(1,2,3,4,5,6,7,8,9,10,11,12,13,14,15,16,17,18,19): note = RNA
  misc_feature order(20,21): note = DNA
  misc_feature 1..21: note = Synthetic oligonucleotide
  source 1..21: mol_type = other RNA
gctggaagtcgtttggctttt

SEQ ID NO: 607 - RNA, 21 nt, synthetic construct
  modified_base 20..21: mod_base = OTHER; note = thymine
  misc_feature order(1,2,3,4,5,6,7,8,9,10,11,12,13,14,15,16,17,18,19): note = RNA
  misc_feature order(20,21): note = DNA
  misc_feature 1..21: note = Synthetic oligonucleotide
  source 1..21: mol_type = other RNA
tggaagtcgtttggcttgttt

SEQ ID NO: 608 - RNA, 21 nt, synthetic construct
  modified_base 20..21: mod_base = OTHER; note = thymine
  misc_feature order(1,2,3,4,5,6,7,8,9,10,11,12,13,14,15,16,17,18,19): note = RNA
  misc_feature order(20,21): note = DNA
  misc_feature 1..21: note = Synthetic oligonucleotide
  source 1..21: mol_type = other RNA
ggaagtcgtttggcttgtgtt

SEQ ID NO: 609 - RNA, 21 nt, synthetic construct
  modified_base 20..21: mod_base = OTHER; note = thymine
  misc_feature order(1,2,3,4,5,6,7,8,9,10,11,12,13,14,15,16,17,18,19): note = RNA
  misc_feature order(20,21): note = DNA
  misc_feature 1..21: note = Synthetic oligonucleotide
  source 1..21: mol_type = other RNA
gaagtcgtttggcttgtggtt

SEQ ID NO: 610 - RNA, 21 nt, synthetic construct
  modified_base 20..21: mod_base = OTHER; note = thymine
  misc_feature order(1,2,3,4,5,6,7,8,9,10,11,12,13,14,15,16,17,18,19): note = RNA
  misc_feature order(20,21): note = DNA
  misc_feature 1..21: note = Synthetic oligonucleotide
  source 1..21: mol_type = other RNA
aagtcgtttggcttgtggttt

SEQ ID NO: 611 - RNA, 21 nt, synthetic construct
  modified_base 20..21: mod_base = OTHER; note = thymine
  misc_feature order(1,2,3,4,5,6,7,8,9,10,11,12,13,14,15,16,17,18,19): note = RNA
  misc_feature order(20,21): note = DNA
  misc_feature 1..21: note = Synthetic oligonucleotide
  source 1..21: mol_type = other RNA
tcgtttggcttgtggtgtatt

SEQ ID NO: 612 - RNA, 21 nt, synthetic construct
  modified_base 20..21: mod_base = OTHER; note = thymine
  misc_feature order(1,2,3,4,5,6,7,8,9,10,11,12,13,14,15,16,17,18,19): note = RNA
  misc_feature order(20,21): note = DNA
  misc_feature 1..21: note = Synthetic oligonucleotide
  source 1..21: mol_type = other RNA
cgtttggcttgtggtgtaatt

SEQ ID NO: 613 - RNA, 21 nt, synthetic construct
  modified_base 20..21: mod_base = OTHER; note = thymine
  misc_feature order(1,2,3,4,5,6,7,8,9,10,11,12,13,14,15,16,17,18,19): note = RNA
  misc_feature order(20,21): note = DNA
  misc_feature 1..21: note = Synthetic oligonucleotide
  source 1..21: mol_type = other RNA
gtttggcttgtggtgtaattt

SEQ ID NO: 614 - RNA, 21 nt, synthetic construct
  modified_base 20..21: mod_base = OTHER; note = thymine
  misc_feature order(1,2,3,4,5,6,7,8,9,10,11,12,13,14,15,16,17,18,19): note = RNA
  misc_feature order(20,21): note = DNA
  misc_feature 1..21: note = Synthetic oligonucleotide
  source 1..21: mol_type = other RNA
tttggcttgtggtgtaatttt

SEQ ID NO: 615 - RNA, 21 nt, synthetic construct
  modified_base 20..21: mod_base = OTHER; note = thymine
  misc_feature order(1,2,3,4,5,6,7,8,9,10,11,12,13,14,15,16,17,18,19): note = RNA
  misc_feature order(20,21): note = DNA
  misc_feature 1..21: note = Synthetic oligonucleotide
  source 1..21: mol_type = other RNA
ttggcttgtggtgtaattgtt

SEQ ID NO: 616 - RNA, 21 nt, synthetic construct
  modified_base 20..21: mod_base = OTHER; note = thymine
  misc_feature order(1,2,3,4,5,6,7,8,9,10,11,12,13,14,15,16,17,18,19): note = RNA
  misc_feature order(20,21): note = DNA
  misc_feature 1..21: note = Synthetic oligonucleotide
  source 1..21: mol_type = other RNA
tggcttgtggtgtaattggtt

SEQ ID NO: 617 - RNA, 21 nt, synthetic construct
  modified_base 20..21: mod_base = OTHER; note = thymine
  misc_feature order(1,2,3,4,5,6,7,8,9,10,11,12,13,14,15,16,17,18,19): note = RNA
  misc_feature order(20,21): note = DNA
  misc_feature 1..21: note = Synthetic oligonucleotide
  source 1..21: mol_type = other RNA
ggcttgtggtgtaattgggtt

SEQ ID NO: 618 - RNA, 21 nt, synthetic construct
  modified_base 20..21: mod_base = OTHER; note = thymine
  misc_feature order(1,2,3,4,5,6,7,8,9,10,11,12,13,14,15,16,17,18,19): note = RNA
  misc_feature order(20,21): note = DNA
  misc_feature 1..21: note = Synthetic oligonucleotide
  source 1..21: mol_type = other RNA
gcttgtggtgtaattgggatt

SEQ ID NO: 619 - RNA, 21 nt, synthetic construct
  modified_base 20..21: mod_base = OTHER; note = thymine
  misc_feature order(1,2,3,4,5,6,7,8,9,10,11,12,13,14,15,16,17,18,19): note = RNA
  misc_feature order(20,21): note = DNA
  misc_feature 1..21: note = Synthetic oligonucleotide
  source 1..21: mol_type = other RNA
cttgtggtgtaattgggattt

SEQ ID NO: 620 - RNA, 21 nt, synthetic construct
  modified_base 20..21: mod_base = OTHER; note = thymine
  misc_feature order(1,2,3,4,5,6,7,8,9,10,11,12,13,14,15,16,17,18,19): note = RNA
  misc_feature order(20,21): note = DNA
  misc_feature 1..21: note = Synthetic oligonucleotide
  source 1..21: mol_type = other RNA
gtgtaattgggatcgcccatt

SEQ ID NO: 621 - RNA, 21 nt, synthetic construct
  modified_base 20..21: mod_base = OTHER; note = thymine
  misc_feature order(1,2,3,4,5,6,7,8,9,10,11,12,13,14,15,16,17,18,19): note = RNA
  misc_feature order(20,21): note = DNA
  misc_feature 1..21: note = Synthetic oligonucleotide
  source 1..21: mol_type = other RNA
tgtaattgggatcgcccaatt

SEQ ID NO: 622 - RNA, 21 nt, synthetic construct
  modified_base 20..21: mod_base = OTHER; note = thymine
  misc_feature order(1,2,3,4,5,6,7,8,9,10,11,12,13,14,15,16,17,18,19): note = RNA
  misc_feature order(20,21): note = DNA
  misc_feature 1..21: note = Synthetic oligonucleotide
  source 1..21: mol_type = other RNA
gtaattgggatcgcccaattt

SEQ ID NO: 623 - RNA, 21 nt, synthetic construct
  modified_base 20..21: mod_base = OTHER; note = thymine
  misc_feature order(1,2,3,4,5,6,7,8,9,10,11,12,13,14,15,16,17,18,19): note = RNA
  misc_feature order(20,21): note = DNA
  misc_feature 1..21: note = Synthetic oligonucleotide
  source 1..21: mol_type = other RNA
taattgggatcgcccaatatt

SEQ ID NO: 624 - RNA, 21 nt, synthetic construct
  modified_base 20..21: mod_base = OTHER; note = thymine
  misc_feature order(1,2,3,4,5,6,7,8,9,10,11,12,13,14,15,16,17,18,19): note = RNA
  misc_feature order(20,21): note = DNA
  misc_feature 1..21: note = Synthetic oligonucleotide
  source 1..21: mol_type = other RNA
aattgggatcgcccaataatt

SEQ ID NO: 625 - DNA, 24 bp, synthetic construct
  misc_feature 1..24: note = Synthetic primer
  source 1..24: mol_type = other DNA
ctaggccacagaattgaaagatct

SEQ ID NO: 626 - RNA, 21 nt, synthetic construct
  modified_base 20..21: mod_base = OTHER; note = thymine
  misc_feature order(1,2,3,4,5,6,7,8,9,10,11,12,13,14,15,16,17,18,19): note = RNA
  misc_feature order(20,21): note = DNA
  misc_feature 1..21: note = Synthetic oligonucleotide
  source 1..21: mol_type = other RNA
acgcacacggccttcgtcgtt

SEQ ID NO: 627 - RNA, 21 nt, synthetic construct
  modified_base 20..21: mod_base = OTHER; note = thymine
  misc_feature order(1,2,3,4,5,6,7,8,9,10,11,12,13,14,15,16,17,18,19): note = RNA
  misc_feature order(20,21): note = DNA
  misc_feature 1..21: note = Synthetic oligonucleotide
  source 1..21: mol_type = other RNA
agcacgcacacggccttcgtt

SEQ ID NO: 628 - RNA, 21 nt, synthetic construct
  modified_base 20..21: mod_base = OTHER; note = thymine
  misc_feature order(1,2,3,4,5,6,7,8,9,10,11,12,13,14,15,16,17,18,19): note = RNA
  misc_feature order(20,21): note = DNA
  misc_feature 1..21: note = Synthetic oligonucleotide
  source 1..21: mol_type = other RNA
tcagcacgcacacggcctttt

SEQ ID NO: 629 - RNA, 21 nt, synthetic construct
  modified_base 20..21: mod_base = OTHER; note = thymine
  misc_feature order(1,2,3,4,5,6,7,8,9,10,11,12,13,14,15,16,17,18,19): note = RNA
  misc_feature order(20,21): note = DNA
  misc_feature 1..21: note = Synthetic oligonucleotide
  source 1..21: mol_type = other RNA
ttcagcacgcacacggccttt

SEQ ID NO: 630 - RNA, 21 nt, synthetic construct
  modified_base 20..21: mod_base = OTHER; note = thymine
  misc_feature order(1,2,3,4,5,6,7,8,9,10,11,12,13,14,15,16,17,18,19): note = RNA
  misc_feature order(20,21): note = DNA
  misc_feature 1..21: note = Synthetic oligonucleotide
  source 1..21: mol_type = other RNA
tcgcccttcagcacgcacatt

SEQ ID NO: 631 - RNA, 21 nt, synthetic construct
  modified_base 20..21: mod_base = OTHER; note = thymine
  misc_feature order(1,2,3,4,5,6,7,8,9,10,11,12,13,14,15,16,17,18,19): note = RNA
  misc_feature order(20,21): note = DNA
  misc_feature 1..21: note = Synthetic oligonucleotide
  source 1..21: mol_type = other RNA
atgccctgcactgggccgttt

SEQ ID NO: 632 - RNA, 21 nt, synthetic construct
  modified_base 20..21: mod_base = OTHER; note = thymine
  misc_feature order(1,2,3,4,5,6,7,8,9,10,11,12,13,14,15,16,17,18,19): note = RNA
  misc_feature order(20,21): note = DNA
  misc_feature 1..21: note = Synthetic oligonucleotide
  source 1..21: mol_type = other RNA
tgatgccctgcactgggcctt

SEQ ID NO: 633 - RNA, 21 nt, synthetic construct
  modified_base 20..21: mod_base = OTHER; note = thymine
  misc_feature order(1,2,3,4,5,6,7,8,9,10,11,12,13,14,15,16,17,18,19): note = RNA
  misc_feature order(20,21): note = DNA
  misc_feature 1..21: note = Synthetic oligonucleotide
  source 1..21: mol_type = other RNA
atgatgccctgcactgggctt

SEQ ID NO: 634 - RNA, 21 nt, synthetic construct
  modified_base 20..21: mod_base = OTHER; note = thymine
  misc_feature order(1,2,3,4,5,6,7,8,9,10,11,12,13,14,15,16,17,18,19): note = RNA
  misc_feature order(20,21): note = DNA
  misc_feature 1..21: note = Synthetic oligonucleotide
  source 1..21: mol_type = other RNA
tgatgatgccctgcactggtt

SEQ ID NO: 635 - RNA, 21 nt, synthetic construct
  modified_base 20..21: mod_base = OTHER; note = thymine
  misc_feature order(1,2,3,4,5,6,7,8,9,10,11,12,13,14,15,16,17,18,19): note = RNA
  misc_feature order(20,21): note = DNA
  misc_feature 1..21: note = Synthetic oligonucleotide
  source 1..21: mol_type = other RNA
ttgatgatgccctgcactgtt

SEQ ID NO: 636 - RNA, 21 nt, synthetic construct
  modified_base 20..21: mod_base = OTHER; note = thymine
  misc_feature order(1,2,3,4,5,6,7,8,9,10,11,12,13,14,15,16,17,18,19): note = RNA
  misc_feature order(20,21): note = DNA
  misc_feature 1..21: note = Synthetic oligonucleotide
  source 1..21: mol_type = other RNA
attgatgatgccctgcacttt

SEQ ID NO: 637 - RNA, 21 nt, synthetic construct
  modified_base 20..21: mod_base = OTHER; note = thymine
  misc_feature order(1,2,3,4,5,6,7,8,9,10,11,12,13,14,15,16,17,18,19): note = RNA
  misc_feature order(20,21): note = DNA
  misc_feature 1..21: note = Synthetic oligonucleotide
  source 1..21: mol_type = other RNA
aattgatgatgccctgcactt

SEQ ID NO: 638 - RNA, 21 nt, synthetic construct
  modified_base 20..21: mod_base = OTHER; note = thymine
  misc_feature order(1,2,3,4,5,6,7,8,9,10,11,12,13,14,15,16,17,18,19): note = RNA
  misc_feature order(20,21): note = DNA
  misc_feature 1..21: note = Synthetic oligonucleotide
  source 1..21: mol_type = other RNA
aaattgatgatgccctgcatt

SEQ ID NO: 639 - RNA, 21 nt, synthetic construct
  modified_base 20..21: mod_base = OTHER; note = thymine
  misc_feature order(1,2,3,4,5,6,7,8,9,10,11,12,13,14,15,16,17,18,19): note = RNA
  misc_feature order(20,21): note = DNA
  misc_feature 1..21: note = Synthetic oligonucleotide
  source 1..21: mol_type = other RNA
gaaattgatgatgccctgctt

SEQ ID NO: 640 - RNA, 21 nt, synthetic construct
  modified_base 20..21: mod_base = OTHER; note = thymine
  misc_feature order(1,2,3,4,5,6,7,8,9,10,11,12,13,14,15,16,17,18,19): note = RNA
  misc_feature order(20,21): note = DNA
  misc_feature 1..21: note = Synthetic oligonucleotide
  source 1..21: mol_type = other RNA
cgaaattgatgatgccctgtt

SEQ ID NO: 641 - RNA, 21 nt, synthetic construct
  modified_base 20..21: mod_base = OTHER; note = thymine
  misc_feature order(1,2,3,4,5,6,7,8,9,10,11,12,13,14,15,16,17,18,19): note = RNA
  misc_feature order(20,21): note = DNA
  misc_feature 1..21: note = Synthetic oligonucleotide
  source 1..21: mol_type = other RNA
tcgaaattgatgatgcccttt

SEQ ID NO: 642 - RNA, 21 nt, synthetic construct
  modified_base 20..21: mod_base = OTHER; note = thymine
  misc_feature order(1,2,3,4,5,6,7,8,9,10,11,12,13,14,15,16,17,18,19): note = RNA
  misc_feature order(20,21): note = DNA
  misc_feature 1..21: note = Synthetic oligonucleotide
  source 1..21: mol_type = other RNA
tgctcgaaattgatgatgctt

SEQ ID NO: 643 - RNA, 21 nt, synthetic construct
  modified_base 20..21: mod_base = OTHER; note = thymine
  misc_feature order(1,2,3,4,5,6,7,8,9,10,11,12,13,14,15,16,17,18,19): note = RNA
  misc_feature order(20,21): note = DNA
  misc_feature 1..21: note = Synthetic oligonucleotide
  source 1..21: mol_type = other RNA
ctgctcgaaattgatgatgtt

SEQ ID NO: 644 - RNA, 21 nt, synthetic construct
  modified_base 20..21: mod_base = OTHER; note = thymine
  misc_feature order(1,2,3,4,5,6,7,8,9,10,11,12,13,14,15,16,17,18,19): note = RNA
  misc_feature order(20,21): note = DNA
  misc_feature 1..21: note = Synthetic oligonucleotide
  source 1..21: mol_type = other RNA
tctgctcgaaattgatgattt

SEQ ID NO: 645 - RNA, 21 nt, synthetic construct
  modified_base 20..21: mod_base = OTHER; note = thymine
  misc_feature order(1,2,3,4,5,6,7,8,9,10,11,12,13,14,15,16,17,18,19): note = RNA
  misc_feature order(20,21): note = DNA
  misc_feature 1..21: note = Synthetic oligonucleotide
  source 1..21: mol_type = other RNA
ttctgctcgaaattgatgatt

SEQ ID NO: 646 - RNA, 21 nt, synthetic construct
  modified_base 20..21: mod_base = OTHER; note = thymine
  misc_feature order(1,2,3,4,5,6,7,8,9,10,11,12,13,14,15,16,17,18,19): note = RNA
  misc_feature order(20,21): note = DNA
  misc_feature 1..21: note = Synthetic oligonucleotide
  source 1..21: mol_type = other RNA
tccttctgctcgaaattgatt

SEQ ID NO: 647 - RNA, 21 nt, synthetic construct
  modified_base 20..21: mod_base = OTHER; note = thymine
  misc_feature order(1,2,3,4,5,6,7,8,9,10,11,12,13,14,15,16,17,18,19): note = RNA
  misc_feature order(20,21): note = DNA
  misc_feature 1..21: note = Synthetic oligonucleotide
  source 1..21: mol_type = other RNA
ttccttctgctcgaaattgtt

SEQ ID NO: 648 - RNA, 21 nt, synthetic construct
  modified_base 20..21: mod_base = OTHER; note = thymine
  misc_feature order(1,2,3,4,5,6,7,8,9,10,11,12,13,14,15,16,17,18,19): note = RNA
  misc_feature order(20,21): note = DNA
  misc_feature 1..21: note = Synthetic oligonucleotide
  source 1..21: mol_type = other RNA
tttccttctgctcgaaatttt

SEQ ID NO: 649 - RNA, 21 nt, synthetic construct
  modified_base 20..21: mod_base = OTHER; note = thymine
  misc_feature order(1,2,3,4,5,6,7,8,9,10,11,12,13,14,15,16,17,18,19): note = RNA
  misc_feature order(20,21): note = DNA
  misc_feature 1..21: note = Synthetic oligonucleotide
  source 1..21: mol_type = other RNA
ctttccttctgctcgaaattt

SEQ ID NO: 650 - RNA, 21 nt, synthetic construct
  modified_base 20..21: mod_base = OTHER; note = thymine
  misc_feature order(1,2,3,4,5,6,7,8,9,10,11,12,13,14,15,16,17,18,19): note = RNA
  misc_feature order(20,21): note = DNA
  misc_feature 1..21: note = Synthetic oligonucleotide
  source 1..21: mol_type = other RNA
actttccttctgctcgaaatt

SEQ ID NO: 651 - RNA, 21 nt, synthetic construct
  modified_base 20..21: mod_base = OTHER; note = thymine
  misc_feature order(1,2,3,4,5,6,7,8,9,10,11,12,13,14,15,16,17,18,19): note = RNA
  misc_feature order(20,21): note = DNA
  misc_feature 1..21: note = Synthetic oligonucleotide
  source 1..21: mol_type = other RNA
tactttccttctgctcgaatt

SEQ ID NO: 652 - RNA, 21 nt, synthetic construct
  modified_base 20..21: mod_base = OTHER; note = thymine
  misc_feature order(1,2,3,4,5,6,7,8,9,10,11,12,13,14,15,16,17,18,19): note = RNA
  misc_feature order(20,21): note = DNA
  misc_feature 1..21: note = Synthetic oligonucleotide
  source 1..21: mol_type = other RNA
ttactttccttctgctcgatt

SEQ ID NO: 653 - RNA, 21 nt, synthetic construct
  modified_base 20..21: mod_base = OTHER; note = thymine
  misc_feature order(1,2,3,4,5,6,7,8,9,10,11,12,13,14,15,16,17,18,19): note = RNA
  misc_feature order(20,21): note = DNA
  misc_feature 1..21: note = Synthetic oligonucleotide
  source 1..21: mol_type = other RNA
attactttccttctgctcgtt

SEQ ID NO: 654 - RNA, 21 nt, synthetic construct
  modified_base 20..21: mod_base = OTHER; note = thymine
  misc_feature order(1,2,3,4,5,6,7,8,9,10,11,12,13,14,15,16,17,18,19): note = RNA
  misc_feature order(20,21): note = DNA
  misc_feature 1..21: note = Synthetic oligonucleotide
  source 1..21: mol_type = other RNA
cattactttccttctgctctt

SEQ ID NO: 655 - RNA, 21 nt, synthetic construct
  modified_base 20..21: mod_base = OTHER; note = thymine
  misc_feature order(1,2,3,4,5,6,7,8,9,10,11,12,13,14,15,16,17,18,19): note = RNA
  misc_feature order(20,21): note = DNA
  misc_feature 1..21: note = Synthetic oligonucleotide
  source 1..21: mol_type = other RNA
tccattactttccttctgctt

SEQ ID NO: 656 - RNA, 21 nt, synthetic construct
  modified_base 20..21: mod_base = OTHER; note = thymine
  misc_feature order(1,2,3,4,5,6,7,8,9,10,11,12,13,14,15,16,17,18,19): note = RNA
  misc_feature order(20,21): note = DNA
  misc_feature 1..21: note = Synthetic oligonucleotide
  source 1..21: mol_type = other RNA
tggtccattactttccttctt

SEQ ID NO: 657 - RNA, 21 nt, synthetic construct
  modified_base 20..21: mod_base = OTHER; note = thymine
  misc_feature order(1,2,3,4,5,6,7,8,9,10,11,12,13,14,15,16,17,18,19): note = RNA
  misc_feature order(20,21): note = DNA
  misc_feature 1..21: note = Synthetic oligonucleotide
  source 1..21: mol_type = other RNA
cactggtccattactttcctt

SEQ ID NO: 658 - RNA, 21 nt, synthetic construct
  modified_base 20..21: mod_base = OTHER; note = thymine
  misc_feature order(1,2,3,4,5,6,7,8,9,10,11,12,13,14,15,16,17,18,19): note = RNA
  misc_feature order(20,21): note = DNA
  misc_feature 1..21: note = Synthetic oligonucleotide
  source 1..21: mol_type = other RNA
tcactggtccattactttctt

SEQ ID NO: 659 - RNA, 21 nt, synthetic construct
  modified_base 20..21: mod_base = OTHER; note = thymine
  misc_feature order(1,2,3,4,5,6,7,8,9,10,11,12,13,14,15,16,17,18,19): note = RNA
  misc_feature order(20,21): note = DNA
  misc_feature 1..21: note = Synthetic oligonucleotide
  source 1..21: mol_type = other RNA
ttcactggtccattacttttt

SEQ ID NO: 660 - RNA, 21 nt, synthetic construct
  modified_base 20..21: mod_base = OTHER; note = thymine
  misc_feature order(1,2,3,4,5,6,7,8,9,10,11,12,13,14,15,16,17,18,19): note = RNA
  misc_feature order(20,21): note = DNA
  misc_feature 1..21: note = Synthetic oligonucleotide
  source 1..21: mol_type = other RNA
cttcactggtccattactttt

SEQ ID NO: 661 - RNA, 21 nt, synthetic construct
  modified_base 20..21: mod_base = OTHER; note = thymine
  misc_feature order(1,2,3,4,5,6,7,8,9,10,11,12,13,14,15,16,17,18,19): note = RNA
  misc_feature order(20,21): note = DNA
  misc_feature 1..21: note = Synthetic oligonucleotide
  source 1..21: mol_type = other RNA
accttcactggtccattactt

SEQ ID NO: 662 - RNA, 21 nt, synthetic construct
  modified_base 20..21: mod_base = OTHER; note = thymine
  misc_feature order(1,2,3,4,5,6,7,8,9,10,11,12,13,14,15,16,17,18,19): note = RNA
  misc_feature order(20,21): note = DNA
  misc_feature 1..21: note = Synthetic oligonucleotide
  source 1..21: mol_type = other RNA
acaccttcactggtccatttt

SEQ ID NO: 663 - RNA, 21 nt, synthetic construct
  modified_base 20..21: mod_base = OTHER; note = thymine
  misc_feature order(1,2,3,4,5,6,7,8,9,10,11,12,13,14,15,16,17,18,19): note = RNA
  misc_feature order(20,21): note = DNA
  misc_feature 1..21: note = Synthetic oligonucleotide
  source 1..21: mol_type = other RNA
cacaccttcactggtccattt

SEQ ID NO: 664 - RNA, 21 nt, synthetic construct
  modified_base 20..21: mod_base = OTHER; note = thymine
  misc_feature order(1,2,3,4,5,6,7,8,9,10,11,12,13,14,15,16,17,18,19): note = RNA
  misc_feature order(20,21): note = DNA
  misc_feature 1..21: note = Synthetic oligonucleotide
  source 1..21: mol_type = other RNA
ttccccacaccttcactggtt

SEQ ID NO: 665 - RNA, 21 nt, synthetic construct
  modified_base 20..21: mod_base = OTHER; note = thymine
  misc_feature order(1,2,3,4,5,6,7,8,9,10,11,12,13,14,15,16,17,18,19): note = RNA
  misc_feature order(20,21): note = DNA
  misc_feature 1..21: note = Synthetic oligonucleotide
  source 1..21: mol_type = other RNA
tgcttccccacaccttcactt

SEQ ID NO: 666 - RNA, 21 nt, synthetic construct
  modified_base 20..21: mod_base = OTHER; note = thymine
  misc_feature order(1,2,3,4,5,6,7,8,9,10,11,12,13,14,15,16,17,18,19): note = RNA
  misc_feature order(20,21): note = DNA
  misc_feature 1..21: note = Synthetic oligonucleotide
  source 1..21: mol_type = other RNA
atgcttccccacaccttcatt

SEQ ID NO: 667 - RNA, 21 nt, synthetic construct
  modified_base 20..21: mod_base = OTHER; note = thymine
  misc_feature order(1,2,3,4,5,6,7,8,9,10,11,12,13,14,15,16,17,18,19): note = RNA
  misc_feature order(20,21): note = DNA
  misc_feature 1..21: note = Synthetic oligonucleotide
  source 1..21: mol_type = other RNA
aatgcttccccacaccttctt

SEQ ID NO: 668 - RNA, 21 nt, synthetic construct
  modified_base 20..21: mod_base = OTHER; note = thymine
  misc_feature order(1,2,3,4,5,6,7,8,9,10,11,12,13,14,15,16,17,18,19): note = RNA
  misc_feature order(20,21): note = DNA
  misc_feature 1..21: note = Synthetic oligonucleotide
  source 1..21: mol_type = other RNA
taatgcttccccacacctttt

SEQ ID NO: 669 - RNA, 21 nt, synthetic construct
  modified_base 20..21: mod_base = OTHER; note = thymine
  misc_feature order(1,2,3,4,5,6,7,8,9,10,11,12,13,14,15,16,17,18,19): note = RNA
  misc_feature order(20,21): note = DNA
  misc_feature 1..21: note = Synthetic oligonucleotide
  source 1..21: mol_type = other RNA
ttaatgcttccccacaccttt

SEQ ID NO: 670 - RNA, 21 nt, synthetic construct
  modified_base 20..21: mod_base = OTHER; note = thymine
  misc_feature order(1,2,3,4,5,6,7,8,9,10,11,12,13,14,15,16,17,18,19): note = RNA
  misc_feature order(20,21): note = DNA
  misc_feature 1..21: note = Synthetic oligonucleotide
  source 1..21: mol_type = other RNA
tttaatgcttccccacacctt

SEQ ID NO: 671 - RNA, 21 nt, synthetic construct
  modified_base 20..21: mod_base = OTHER; note = thymine
  misc_feature order(1,2,3,4,5,6,7,8,9,10,11,12,13,14,15,16,17,18,19): note = RNA
  misc_feature order(20,21): note = DNA
  misc_feature 1..21: note = Synthetic oligonucleotide
  source 1..21: mol_type = other RNA
ctttaatgcttccccacactt

SEQ ID NO: 672 - RNA, 21 nt, synthetic construct
  modified_base 20..21: mod_base = OTHER; note = thymine
  misc_feature order(1,2,3,4,5,6,7,8,9,10,11,12,13,14,15,16,17,18,19): note = RNA
  misc_feature order(20,21): note = DNA
  misc_feature 1..21: note = Synthetic oligonucleotide
  source 1..21: mol_type = other RNA
cctttaatgcttccccacatt

SEQ ID NO: 673 - RNA, 21 nt, synthetic construct
  modified_base 20..21: mod_base = OTHER; note = thymine
  misc_feature order(1,2,3,4,5,6,7,8,9,10,11,12,13,14,15,16,17,18,19): note = RNA
  misc_feature order(20,21): note = DNA
  misc_feature 1..21: note = Synthetic oligonucleotide
  source 1..21: mol_type = other RNA
tcctttaatgcttccccactt

SEQ ID NO: 674 - RNA, 21 nt, synthetic construct
  modified_base 20..21: mod_base = OTHER; note = thymine
  misc_feature order(1,2,3,4,5,6,7,8,9,10,11,12,13,14,15,16,17,18,19): note = RNA
  misc_feature order(20,21): note = DNA
  misc_feature 1..21: note = Synthetic oligonucleotide
  source 1..21: mol_type = other RNA
agtcctttaatgcttcccctt

SEQ ID NO: 675 - RNA, 21 nt, synthetic construct
  modified_base 20..21: mod_base = OTHER; note = thymine
  misc_feature order(1,2,3,4,5,6,7,8,9,10,11,12,13,14,15,16,17,18,19): note = RNA
  misc_feature order(20,21): note = DNA
  misc_feature 1..21: note = Synthetic oligonucleotide
  source 1..21: mol_type = other RNA
cagtcctttaatgcttccctt

SEQ ID NO: 676 - RNA, 21 nt, synthetic construct
  modified_base 20..21: mod_base = OTHER; note = thymine
  misc_feature order(1,2,3,4,5,6,7,8,9,10,11,12,13,14,15,16,17,18,19): note = RNA
  misc_feature order(20,21): note = DNA
  misc_feature 1..21: note = Synthetic oligonucleotide
  source 1..21: mol_type = other RNA
tcagtcctttaatgcttcctt

SEQ ID NO: 677 - RNA, 21 nt, synthetic construct
  modified_base 20..21: mod_base = OTHER; note = thymine
  misc_feature order(1,2,3,4,5,6,7,8,9,10,11,12,13,14,15,16,17,18,19): note = RNA
  misc_feature order(20,21): note = DNA
  misc_feature 1..21: note = Synthetic oligonucleotide
  source 1..21: mol_type = other RNA
agtcagtcctttaatgctttt

SEQ ID NO: 678 - RNA, 21 nt, synthetic construct
  modified_base 20..21: mod_base = OTHER; note = thymine
  misc_feature order(1,2,3,4,5,6,7,8,9,10,11,12,13,14,15,16,17,18,19): note = RNA
  misc_feature order(20,21): note = DNA
  misc_feature 1..21: note = Synthetic oligonucleotide
  source 1..21: mol_type = other RNA
tcagtcagtcctttaatgctt

SEQ ID NO: 679 - RNA, 21 nt, synthetic construct
  modified_base 20..21: mod_base = OTHER; note = thymine
  misc_feature order(1,2,3,4,5,6,7,8,9,10,11,12,13,14,15,16,17,18,19): note = RNA
  misc_feature order(20,21): note = DNA
  misc_feature 1..21: note = Synthetic oligonucleotide
  source 1..21: mol_type = other RNA
ttcagtcagtcctttaatgtt

SEQ ID NO: 680 - RNA, 21 nt, synthetic construct
  modified_base 20..21: mod_base = OTHER; note = thymine
  misc_feature order(1,2,3,4,5,6,7,8,9,10,11,12,13,14,15,16,17,18,19): note = RNA
  misc_feature order(20,21): note = DNA
  misc_feature 1..21: note = Synthetic oligonucleotide
  source 1..21: mol_type = other RNA
cttcagtcagtcctttaattt

SEQ ID NO: 681 - RNA, 21 nt, synthetic construct
  modified_base 20..21: mod_base = OTHER; note = thymine
  misc_feature order(1,2,3,4,5,6,7,8,9,10,11,12,13,14,15,16,17,18,19): note = RNA
  misc_feature order(20,21): note = DNA
  misc_feature 1..21: note = Synthetic oligonucleotide
  source 1..21: mol_type = other RNA
ccttcagtcagtcctttaatt

SEQ ID NO: 682 - RNA, 21 nt, synthetic construct
  modified_base 20..21: mod_base = OTHER; note = thymine
  misc_feature order(1,2,3,4,5,6,7,8,9,10,11,12,13,14,15,16,17,18,19): note = RNA
  misc_feature order(20,21): note = DNA
  misc_feature 1..21: note = Synthetic oligonucleotide
  source 1..21: mol_type = other RNA
gccttcagtcagtcctttatt

SEQ ID NO: 683 - RNA, 21 nt, synthetic construct
  modified_base 20..21: mod_base = OTHER; note = thymine
  misc_feature order(1,2,3,4,5,6,7,8,9,10,11,12,13,14,15,16,17,18,19): note = RNA
  misc_feature order(20,21): note = DNA
  misc_feature 1..21: note = Synthetic oligonucleotide
  source 1..21: mol_type = other RNA
atgcaggccttcagtcagttt

SEQ ID NO: 684 - RNA, 21 nt, synthetic construct
  modified_base 20..21: mod_base = OTHER; note = thymine
  misc_feature order(1,2,3,4,5,6,7,8,9,10,11,12,13,14,15,16,17,18,19): note = RNA
  misc_feature order(20,21): note = DNA
  misc_feature 1..21: note = Synthetic oligonucleotide
  source 1..21: mol_type = other RNA
tccatgcaggccttcagtctt

SEQ ID NO: 685 - RNA, 21 nt, synthetic construct
  modified_base 20..21: mod_base = OTHER; note = thymine
  misc_feature order(1,2,3,4,5,6,7,8,9,10,11,12,13,14,15,16,17,18,19): note = RNA
  misc_feature order(20,21): note = DNA
  misc_feature 1..21: note = Synthetic oligonucleotide
  source 1..21: mol_type = other RNA
atccatgcaggccttcagttt

SEQ ID NO: 686 - RNA, 21 nt, synthetic construct
  modified_base 20..21: mod_base = OTHER; note = thymine
  misc_feature order(1,2,3,4,5,6,7,8,9,10,11,12,13,14,15,16,17,18,19): note = RNA
  misc_feature order(20,21): note = DNA
  misc_feature 1..21: note = Synthetic oligonucleotide
  source 1..21: mol_type = other RNA
aatccatgcaggccttcagtt

SEQ ID NO: 687 - RNA, 21 nt, synthetic construct
  modified_base 20..21: mod_base = OTHER; note = thymine
  misc_feature order(1,2,3,4,5,6,7,8,9,10,11,12,13,14,15,16,17,18,19): note = RNA
  misc_feature order(20,21): note = DNA
  misc_feature 1..21: note = Synthetic oligonucleotide
  source 1..21: mol_type = other RNA
gaatccatgcaggccttcatt

SEQ ID NO: 688 - RNA, 21 nt, synthetic construct
  modified_base 20..21: mod_base = OTHER; note = thymine
  misc_feature order(1,2,3,4,5,6,7,8,9,10,11,12,13,14,15,16,17,18,19): note = RNA
  misc_feature order(20,21): note = DNA
  misc_feature 1..21: note = Synthetic oligonucleotide
  source 1..21: mol_type = other RNA
tggaatccatgcaggcctttt

SEQ ID NO: 689 - RNA, 21 nt, synthetic construct
  modified_base 20..21: mod_base = OTHER; note = thymine
  misc_feature order(1,2,3,4,5,6,7,8,9,10,11,12,13,14,15,16,17,18,19): note = RNA
  misc_feature order(20,21): note = DNA
  misc_feature 1..21: note = Synthetic oligonucleotide
  source 1..21: mol_type = other RNA
atggaatccatgcaggccttt

SEQ ID NO: 690 - RNA, 21 nt, synthetic construct
  modified_base 20..21: mod_base = OTHER; note = thymine
  misc_feature order(1,2,3,4,5,6,7,8,9,10,11,12,13,14,15,16,17,18,19): note = RNA
  misc_feature order(20,21): note = DNA
  misc_feature 1..21: note = Synthetic oligonucleotide
  source 1..21: mol_type = other RNA
acatggaatccatgcaggctt

SEQ ID NO: 691 - RNA, 21 nt, synthetic construct
  modified_base 20..21: mod_base = OTHER; note = thymine
  misc_feature order(1,2,3,4,5,6,7,8,9,10,11,12,13,14,15,16,17,18,19): note = RNA
  misc_feature order(20,21): note = DNA
  misc_feature 1..21: note = Synthetic oligonucleotide
  source 1..21: mol_type = other RNA
aacatggaatccatgcaggtt

SEQ ID NO: 692 - RNA, 21 nt, synthetic construct
  modified_base 20..21: mod_base = OTHER; note = thymine
  misc_feature order(1,2,3,4,5,6,7,8,9,10,11,12,13,14,15,16,17,18,19): note = RNA
  misc_feature order(20,21): note = DNA
  misc_feature 1..21: note = Synthetic oligonucleotide
  source 1..21: mol_type = other RNA
gaacatggaatccatgcagtt

SEQ ID NO: 693 - RNA, 21 nt, synthetic construct
  modified_base 20..21: mod_base = OTHER; note = thymine
  misc_feature order(1,2,3,4,5,6,7,8,9,10,11,12,13,14,15,16,17,18,19): note = RNA
  misc_feature order(20,21): note = DNA
  misc_feature 1..21: note = Synthetic oligonucleotide
  source 1..21: mol_type = other RNA
tgaacatggaatccatgcatt

SEQ ID NO: 694 - RNA, 21 nt, synthetic construct
  modified_base 20..21: mod_base = OTHER; note = thymine
  misc_feature order(1,2,3,4,5,6,7,8,9,10,11,12,13,14,15,16,17,18,19): note = RNA
  misc_feature order(20,21): note = DNA
  misc_feature 1..21: note = Synthetic oligonucleotide
  source 1..21: mol_type = other RNA
atgaacatggaatccatgctt

SEQ ID NO: 695 - RNA, 21 nt, synthetic construct
  modified_base 20..21: mod_base = OTHER; note = thymine
  misc_feature order(1,2,3,4,5,6,7,8,9,10,11,12,13,14,15,16,17,18,19): note = RNA
  misc_feature order(20,21): note = DNA
  misc_feature 1..21: note = Synthetic oligonucleotide
  source 1..21: mol_type = other RNA
tcatgaacatggaatccattt

SEQ ID NO: 696 - RNA, 21 nt, synthetic construct
  modified_base 20..21: mod_base = OTHER; note = thymine
  misc_feature order(1,2,3,4,5,6,7,8,9,10,11,12,13,14,15,16,17,18,19): note = RNA
  misc_feature order(20,21): note = DNA
  misc_feature 1..21: note = Synthetic oligonucleotide
  source 1..21: mol_type = other RNA
ctcatgaacatggaatccatt

SEQ ID NO: 697 - RNA, 21 nt, synthetic construct
  modified_base 20..21: mod_base = OTHER; note = thymine
  misc_feature order(1,2,3,4,5,6,7,8,9,10,11,12,13,14,15,16,17,18,19): note = RNA
  misc_feature order(20,21): note = DNA
  misc_feature 1..21: note = Synthetic oligonucleotide
  source 1..21: mol_type = other RNA
actcatgaacatggaatcctt

SEQ ID NO: 698 - RNA, 21 nt, synthetic construct
  modified_base 20..21: mod_base = OTHER; note = thymine
  misc_feature order(1,2,3,4,5,6,7,8,9,10,11,12,13,14,15,16,17,18,19): note = RNA
  misc_feature order(20,21): note = DNA
  misc_feature 1..21: note = Synthetic oligonucleotide
  source 1..21: mol_type = other RNA
aactcatgaacatggaatctt

SEQ ID NO: 699 - RNA, 21 nt, synthetic construct
  modified_base 20..21: mod_base = OTHER; note = thymine
  misc_feature order(1,2,3,4,5,6,7,8,9,10,11,12,13,14,15,16,17,18,19): note = RNA
  misc_feature order(20,21): note = DNA
  misc_feature 1..21: note = Synthetic oligonucleotide
  source 1..21: mol_type = other RNA
ccaaactcatgaacatggatt

SEQ ID NO: 700 - RNA, 21 nt, synthetic construct
  modified_base 20..21: mod_base = OTHER; note = thymine
  misc_feature order(1,2,3,4,5,6,7,8,9,10,11,12,13,14,15,16,17,18,19): note = RNA
  misc_feature order(20,21): note = DNA
  misc_feature 1..21: note = Synthetic oligonucleotide
  source 1..21: mol_type = other RNA
tccaaactcatgaacatggtt

SEQ ID NO: 701 - RNA, 21 nt, synthetic construct
  modified_base 20..21: mod_base = OTHER; note = thymine
  misc_feature order(1,2,3,4,5,6,7,8,9,10,11,12,13,14,15,16,17,18,19): note = RNA
  misc_feature order(20,21): note = DNA
  misc_feature 1..21: note = Synthetic oligonucleotide
  source 1..21: mol_type = other RNA
tctccaaactcatgaacattt

SEQ ID NO: 702 - RNA, 21 nt, synthetic construct
  modified_base 20..21: mod_base = OTHER; note = thymine
  misc_feature order(1,2,3,4,5,6,7,8,9,10,11,12,13,14,15,16,17,18,19): note = RNA
  misc_feature order(20,21): note = DNA
  misc_feature 1..21: note = Synthetic oligonucleotide
  source 1..21: mol_type = other RNA
atctccaaactcatgaacatt

SEQ ID NO: 703 - RNA, 21 nt, synthetic construct
  modified_base 20..21: mod_base = OTHER; note = thymine
  misc_feature order(1,2,3,4,5,6,7,8,9,10,11,12,13,14,15,16,17,18,19): note = RNA
  misc_feature order(20,21): note = DNA
  misc_feature 1..21: note = Synthetic oligonucleotide
  source 1..21: mol_type = other RNA
tatctccaaactcatgaactt

SEQ ID NO: 704 - RNA, 21 nt, synthetic construct
  modified_base 20..21: mod_base = OTHER; note = thymine
  misc_feature order(1,2,3,4,5,6,7,8,9,10,11,12,13,14,15,16,17,18,19): note = RNA
  misc_feature order(20,21): note = DNA
  misc_feature 1..21: note = Synthetic oligonucleotide
  source 1..21: mol_type = other RNA
ctgtattatctccaaactctt

SEQ ID NO: 705 - RNA, 21 nt, synthetic construct
  modified_base 20..21: mod_base = OTHER; note = thymine
  misc_feature order(1,2,3,4,5,6,7,8,9,10,11,12,13,14,15,16,17,18,19): note = RNA
  misc_feature order(20,21): note = DNA
  misc_feature 1..21: note = Synthetic oligonucleotide
  source 1..21: mol_type = other RNA
tgctgtattatctccaaactt

SEQ ID NO: 706 - RNA, 21 nt, synthetic construct
  modified_base 20..21: mod_base = OTHER; note = thymine
  misc_feature order(1,2,3,4,5,6,7,8,9,10,11,12,13,14,15,16,17,18,19): note = RNA
  misc_feature order(20,21): note = DNA
  misc_feature 1..21: note = Synthetic oligonucleotide
  source 1..21: mol_type = other RNA
agcctgctgtattatctcctt

SEQ ID NO: 707 - RNA, 21 nt, synthetic construct
  modified_base 20..21: mod_base = OTHER; note = thymine
  misc_feature order(1,2,3,4,5,6,7,8,9,10,11,12,13,14,15,16,17,18,19): note = RNA
  misc_feature order(20,21): note = DNA
  misc_feature 1..21: note = Synthetic oligonucleotide
  source 1..21: mol_type = other RNA
acagcctgctgtattatcttt

SEQ ID NO: 708 - RNA, 21 nt, synthetic construct
  modified_base 20..21: mod_base = OTHER; note = thymine
  misc_feature order(1,2,3,4,5,6,7,8,9,10,11,12,13,14,15,16,17,18,19): note = RNA
  misc_feature order(20,21): note = DNA
  misc_feature 1..21: note = Synthetic oligonucleotide
  source 1..21: mol_type = other RNA
tacagcctgctgtattatctt

SEQ ID NO: 709 - RNA, 21 nt, synthetic construct
  modified_base 20..21: mod_base = OTHER; note = thymine
  misc_feature order(1,2,3,4,5,6,7,8,9,10,11,12,13,14,15,16,17,18,19): note = RNA
  misc_feature order(20,21): note = DNA
  misc_feature 1..21: note = Synthetic oligonucleotide
  source 1..21: mol_type = other RNA
gtacagcctgctgtattattt

SEQ ID NO: 710 - RNA, 21 nt, synthetic construct
  modified_base 20..21: mod_base = OTHER; note = thymine
  misc_feature order(1,2,3,4,5,6,7,8,9,10,11,12,13,14,15,16,17,18,19): note = RNA
  misc_feature order(20,21): note = DNA
  misc_feature 1..21: note = Synthetic oligonucleotide
  source 1..21: mol_type = other RNA
ggtacagcctgctgtattatt

SEQ ID NO: 711 - RNA, 21 nt, synthetic construct
  modified_base 20..21: mod_base = OTHER; note = thymine
  misc_feature order(1,2,3,4,5,6,7,8,9,10,11,12,13,14,15,16,17,18,19): note = RNA
  misc_feature order(20,21): note = DNA
  misc_feature 1..21: note = Synthetic oligonucleotide
  source 1..21: mol_type = other RNA
tggtacagcctgctgtatttt

SEQ ID NO: 712 - RNA, 21 nt, synthetic construct
  modified_base 20..21: mod_base = OTHER; note = thymine
  misc_feature order(1,2,3,4,5,6,7,8,9,10,11,12,13,14,15,16,17,18,19): note = RNA
  misc_feature order(20,21): note = DNA
  misc_feature 1..21: note = Synthetic oligonucleotide
  source 1..21: mol_type = other RNA
actggtacagcctgctgtatt

SEQ ID NO: 713 - RNA, 21 nt, synthetic construct
  modified_base 20..21: mod_base = OTHER; note = thymine
  misc_feature order(1,2,3,4,5,6,7,8,9,10,11,12,13,14,15,16,17,18,19): note = RNA
  misc_feature order(20,21): note = DNA
  misc_feature 1..21: note = Synthetic oligonucleotide
  source 1..21: mol_type = other RNA
cactggtacagcctgctgttt

SEQ ID NO: 714 - RNA, 21 nt, synthetic construct
  modified_base 20..21: mod_base = OTHER; note = thymine
  misc_feature order(1,2,3,4,5,6,7,8,9,10,11,12,13,14,15,16,17,18,19): note = RNA
  misc_feature order(20,21): note = DNA
  misc_feature 1..21: note = Synthetic oligonucleotide
  source 1..21: mol_type = other RNA
tgcactggtacagcctgcttt

SEQ ID NO: 715 - RNA, 21 nt, synthetic construct
  modified_base 20..21: mod_base = OTHER; note = thymine
  misc_feature order(1,2,3,4,5,6,7,8,9,10,11,12,13,14,15,16,17,18,19): note = RNA
  misc_feature order(20,21): note = DNA
  misc_feature 1..21: note = Synthetic oligonucleotide
  source 1..21: mol_type = other RNA
aggacctgcactggtacagtt

SEQ ID NO: 716 - RNA, 21 nt, synthetic construct
  modified_base 20..21: mod_base = OTHER; note = thymine
  misc_feature order(1,2,3,4,5,6,7,8,9,10,11,12,13,14,15,16,17,18,19): note = RNA
  misc_feature order(20,21): note = DNA
  misc_feature 1..21: note = Synthetic oligonucleotide
  source 1..21: mol_type = other RNA
tgaggacctgcactggtactt

SEQ ID NO: 717 - RNA, 21 nt, synthetic construct
  modified_base 20..21: mod_base = OTHER; note = thymine
  misc_feature order(1,2,3,4,5,6,7,8,9,10,11,12,13,14,15,16,17,18,19): note = RNA
  misc_feature order(20,21): note = DNA
  misc_feature 1..21: note = Synthetic oligonucleotide
  source 1..21: mol_type = other RNA
agtgaggacctgcactggttt

SEQ ID NO: 718 - RNA, 21 nt, synthetic construct
  modified_base 20..21: mod_base = OTHER; note = thymine
  misc_feature order(1,2,3,4,5,6,7,8,9,10,11,12,13,14,15,16,17,18,19): note = RNA
  misc_feature order(20,21): note = DNA
  misc_feature 1..21: note = Synthetic oligonucleotide
  source 1..21: mol_type = other RNA
aagtgaggacctgcactggtt

SEQ ID NO: 719 - RNA, 21 nt, synthetic construct
  modified_base 20..21: mod_base = OTHER; note = thymine
  misc_feature order(1,2,3,4,5,6,7,8,9,10,11,12,13,14,15,16,17,18,19): note = RNA
  misc_feature order(20,21): note = DNA
  misc_feature 1..21: note = Synthetic oligonucleotide
  source 1..21: mol_type = other RNA
aaagtgaggacctgcactgtt

SEQ ID NO: 720 - RNA, 21 nt, synthetic construct
  modified_base 20..21: mod_base = OTHER; note = thymine
  misc_feature order(1,2,3,4,5,6,7,8,9,10,11,12,13,14,15,16,17,18,19): note = RNA
  misc_feature order(20,21): note = DNA
  misc_feature 1..21: note = Synthetic oligonucleotide
  source 1..21: mol_type = other RNA
taaagtgaggacctgcacttt

SEQ ID NO: 721 - RNA, 21 nt, synthetic construct
  modified_base 20..21: mod_base = OTHER; note = thymine
  misc_feature order(1,2,3,4,5,6,7,8,9,10,11,12,13,14,15,16,17,18,19): note = RNA
  misc_feature order(20,21): note = DNA
  misc_feature 1..21: note = Synthetic oligonucleotide
  source 1..21: mol_type = other RNA
ttaaagtgaggacctgcactt

SEQ ID NO: 722 - RNA, 21 nt, synthetic construct
  modified_base 20..21: mod_base = OTHER; note = thymine
  misc_feature order(1,2,3,4,5,6,7,8,9,10,11,12,13,14,15,16,17,18,19): note = RNA
  misc_feature order(20,21): note = DNA
  misc_feature 1..21: note = Synthetic oligonucleotide
  source 1..21: mol_type = other RNA
attaaagtgaggacctgcatt

SEQ ID NO: 723 - RNA, 21 nt, synthetic construct
  modified_base 20..21: mod_base = OTHER; note = thymine
  misc_feature order(1,2,3,4,5,6,7,8,9,10,11,12,13,14,15,16,17,18,19): note = RNA
  misc_feature order(20,21): note = DNA
  misc_feature 1..21: note = Synthetic oligonucleotide
  source 1..21: mol_type = other RNA
gattaaagtgaggacctgctt

SEQ ID NO: 724 - RNA, 21 nt, synthetic construct
  modified_base 20..21: mod_base = OTHER; note = thymine
  misc_feature order(1,2,3,4,5,6,7,8,9,10,11,12,13,14,15,16,17,18,19): note = RNA
  misc_feature order(20,21): note = DNA
  misc_feature 1..21: note = Synthetic oligonucleotide
  source 1..21: mol_type = other RNA
ggattaaagtgaggacctgtt

SEQ ID NO: 725 - RNA, 21 nt, synthetic construct
  modified_base 20..21: mod_base = OTHER; note = thymine
  misc_feature order(1,2,3,4,5,6,7,8,9,10,11,12,13,14,15,16,17,18,19): note = RNA
  misc_feature order(20,21): note = DNA
  misc_feature 1..21: note = Synthetic oligonucleotide
  source 1..21: mol_type = other RNA
aggattaaagtgaggaccttt

SEQ ID NO: 726 - RNA, 21 nt, synthetic construct
  modified_base 20..21: mod_base = OTHER; note = thymine
  misc_feature order(1,2,3,4,5,6,7,8,9,10,11,12,13,14,15,16,17,18,19): note = RNA
  misc_feature order(20,21): note = DNA
  misc_feature 1..21: note = Synthetic oligonucleotide
  source 1..21: mol_type = other RNA
gaggattaaagtgaggacctt

SEQ ID NO: 727 - RNA, 21 nt, synthetic construct
  modified_base 20..21: mod_base = OTHER; note = thymine
  misc_feature order(1,2,3,4,5,6,7,8,9,10,11,12,13,14,15,16,17,18,19): note = RNA
  misc_feature order(20,21): note = DNA
  misc_feature 1..21: note = Synthetic oligonucleotide
  source 1..21: mol_type = other RNA
agaggattaaagtgaggactt

SEQ ID NO: 728 - RNA, 21 nt, synthetic construct
  modified_base 20..21: mod_base = OTHER; note = thymine
  misc_feature order(1,2,3,4,5,6,7,8,9,10,11,12,13,14,15,16,17,18,19): note = RNA
  misc_feature order(20,21): note = DNA
  misc_feature 1..21: note = Synthetic oligonucleotide
  source 1..21: mol_type = other RNA
tagaggattaaagtgaggatt

SEQ ID NO: 729 - RNA, 21 nt, synthetic construct
  modified_base 20..21: mod_base = OTHER; note = thymine
  misc_feature order(1,2,3,4,5,6,7,8,9,10,11,12,13,14,15,16,17,18,19): note = RNA
  misc_feature order(20,21): note = DNA
  misc_feature 1..21: note = Synthetic oligonucleotide
  source 1..21: mol_type = other RNA
atagaggattaaagtgaggtt

SEQ ID NO: 730 - RNA, 21 nt, synthetic construct
  modified_base 20..21: mod_base = OTHER; note = thymine
  misc_feature order(1,2,3,4,5,6,7,8,9,10,11,12,13,14,15,16,17,18,19): note = RNA
  misc_feature order(20,21): note = DNA
  misc_feature 1..21: note = Synthetic oligonucleotide
  source 1..21: mol_type = other RNA
gatagaggattaaagtgagtt

SEQ ID NO: 731 - RNA, 21 nt, synthetic construct
  modified_base 20..21: mod_base = OTHER; note = thymine
  misc_feature order(1,2,3,4,5,6,7,8,9,10,11,12,13,14,15,16,17,18,19): note = RNA
  misc_feature order(20,21): note = DNA
  misc_feature 1..21: note = Synthetic oligonucleotide
  source 1..21: mol_type = other RNA
ggatagaggattaaagtgatt

SEQ ID NO: 732 - RNA, 21 nt, synthetic construct
  modified_base 20..21: mod_base = OTHER; note = thymine
  misc_feature order(1,2,3,4,5,6,7,8,9,10,11,12,13,14,15,16,17,18,19): note = RNA
  misc_feature order(20,21): note = DNA
  misc_feature 1..21: note = Synthetic oligonucleotide
  source 1..21: mol_type = other RNA
tggatagaggattaaagtgtt

SEQ ID NO: 733 - RNA, 21 nt, synthetic construct
  modified_base 20..21: mod_base = OTHER; note = thymine
  misc_feature order(1,2,3,4,5,6,7,8,9,10,11,12,13,14,15,16,17,18,19): note = RNA
  misc_feature order(20,21): note = DNA
  misc_feature 1..21: note = Synthetic oligonucleotide
  source 1..21: mol_type = other RNA
tctggatagaggattaaagtt

SEQ ID NO: 734 - RNA, 21 nt, synthetic construct
  modified_base 20..21: mod_base = OTHER; note = thymine
  misc_feature order(1,2,3,4,5,6,7,8,9,10,11,12,13,14,15,16,17,18,19): note = RNA
  misc_feature order(20,21): note = DNA
  misc_feature 1..21: note = Synthetic oligonucleotide
  source 1..21: mol_type = other RNA
gttttctggatagaggatttt

SEQ ID NO: 735 - RNA, 21 nt, synthetic construct
  modified_base 20..21: mod_base = OTHER; note = thymine
  misc_feature order(1,2,3,4,5,6,7,8,9,10,11,12,13,14,15,16,17,18,19): note = RNA
  misc_feature order(20,21): note = DNA
  misc_feature 1..21: note = Synthetic oligonucleotide
  source 1..21: mol_type = other RNA
tgttttctggatagaggattt

SEQ ID NO: 736 - RNA, 21 nt, synthetic construct
  modified_base 20..21: mod_base = OTHER; note = thymine
  misc_feature order(1,2,3,4,5,6,7,8,9,10,11,12,13,14,15,16,17,18,19): note = RNA
  misc_feature order(20,21): note = DNA
  misc_feature 1..21: note = Synthetic oligonucleotide
  source 1..21: mol_type = other RNA
gtgttttctggatagaggatt

SEQ ID NO: 737 - RNA, 21 nt, synthetic construct
  modified_base 20..21: mod_base = OTHER; note = thymine
  misc_feature order(1,2,3,4,5,6,7,8,9,10,11,12,13,14,15,16,17,18,19): note = RNA
  misc_feature order(20,21): note = DNA
  misc_feature 1..21: note = Synthetic oligonucleotide
  source 1..21: mol_type = other RNA
accgtgttttctggatagatt

SEQ ID NO: 738 - RNA, 21 nt, synthetic construct
  modified_base 20..21: mod_base = OTHER; note = thymine
  misc_feature order(1,2,3,4,5,6,7,8,9,10,11,12,13,14,15,16,17,18,19): note = RNA
  misc_feature order(20,21): note = DNA
  misc_feature 1..21: note = Synthetic oligonucleotide
  source 1..21: mol_type = other RNA
ttggcccaccgtgttttcttt

SEQ ID NO: 739 - RNA, 21 nt, synthetic construct
  modified_base 20..21: mod_base = OTHER; note = thymine
  misc_feature order(1,2,3,4,5,6,7,8,9,10,11,12,13,14,15,16,17,18,19): note = RNA
  misc_feature order(20,21): note = DNA
  misc_feature 1..21: note = Synthetic oligonucleotide
  source 1..21: mol_type = other RNA
tttggcccaccgtgttttctt

SEQ ID NO: 740 - RNA, 21 nt, synthetic construct
  modified_base 20..21: mod_base = OTHER; note = thymine
  misc_feature order(1,2,3,4,5,6,7,8,9,10,11,12,13,14,15,16,17,18,19): note = RNA
  misc_feature order(20,21): note = DNA
  misc_feature 1..21: note = Synthetic oligonucleotide
  source 1..21: mol_type = other RNA
ctttggcccaccgtgtttttt

SEQ ID NO: 741 - RNA, 21 nt, synthetic construct
  modified_base 20..21: mod_base = OTHER; note = thymine
  misc_feature order(1,2,3,4,5,6,7,8,9,10,11,12,13,14,15,16,17,18,19): note = RNA
  misc_feature order(20,21): note = DNA
  misc_feature 1..21: note = Synthetic oligonucleotide
  source 1..21: mol_type = other RNA
cctttggcccaccgtgttttt

SEQ ID NO: 742 - RNA, 21 nt, synthetic construct
  modified_base 20..21: mod_base = OTHER; note = thymine
  misc_feature order(1,2,3,4,5,6,7,8,9,10,11,12,13,14,15,16,17,18,19): note = RNA
  misc_feature order(20,21): note = DNA
  misc_feature 1..21: note = Synthetic oligonucleotide
  source 1..21: mol_type = other RNA
tcctttggcccaccgtgtttt

SEQ ID NO: 743 - RNA, 21 nt, synthetic construct
  modified_base 20..21: mod_base = OTHER; note = thymine
  misc_feature order(1,2,3,4,5,6,7,8,9,10,11,12,13,14,15,16,17,18,19): note = RNA
  misc_feature order(20,21): note = DNA
  misc_feature 1..21: note = Synthetic oligonucleotide
  source 1..21: mol_type = other RNA
atcctttggcccaccgtgttt

SEQ ID NO: 744 - RNA, 21 nt, synthetic construct
  modified_base 20..21: mod_base = OTHER; note = thymine
  misc_feature order(1,2,3,4,5,6,7,8,9,10,11,12,13,14,15,16,17,18,19): note = RNA
  misc_feature order(20,21): note = DNA
  misc_feature 1..21: note = Synthetic oligonucleotide
  source 1..21: mol_type = other RNA
tcatcctttggcccaccgttt

SEQ ID NO: 745 - RNA, 21 nt, synthetic construct
  modified_base 20..21: mod_base = OTHER; note = thymine
  misc_feature order(1,2,3,4,5,6,7,8,9,10,11,12,13,14,15,16,17,18,19): note = RNA
  misc_feature order(20,21): note = DNA
  misc_feature 1..21: note = Synthetic oligonucleotide
  source 1..21: mol_type = other RNA
ttcatcctttggcccaccgtt

SEQ ID NO: 746 - RNA, 21 nt, synthetic construct
  modified_base 20..21: mod_base = OTHER; note = thymine
  misc_feature order(1,2,3,4,5,6,7,8,9,10,11,12,13,14,15,16,17,18,19): note = RNA
  misc_feature order(20,21): note = DNA
  misc_feature 1..21: note = Synthetic oligonucleotide
  source 1..21: mol_type = other RNA
tcttcatcctttggcccactt

SEQ ID NO: 747 - RNA, 21 nt, synthetic construct
  modified_base 20..21: mod_base = OTHER; note = thymine
  misc_feature order(1,2,3,4,5,6,7,8,9,10,11,12,13,14,15,16,17,18,19): note = RNA
  misc_feature order(20,21): note = DNA
  misc_feature 1..21: note = Synthetic oligonucleotide
  source 1..21: mol_type = other RNA
ctcttcatcctttggcccatt

SEQ ID NO: 748 - RNA, 21 nt, synthetic construct
  modified_base 20..21: mod_base = OTHER; note = thymine
  misc_feature order(1,2,3,4,5,6,7,8,9,10,11,12,13,14,15,16,17,18,19): note = RNA
  misc_feature order(20,21): note = DNA
  misc_feature 1..21: note = Synthetic oligonucleotide
  source 1..21: mol_type = other RNA
tctcttcatcctttggccctt

SEQ ID NO: 749 - RNA, 21 nt, synthetic construct
  modified_base 20..21: mod_base = OTHER; note = thymine
  misc_feature order(1,2,3,4,5,6,7,8,9,10,11,12,13,14,15,16,17,18,19): note = RNA
  misc_feature order(20,21): note = DNA
  misc_feature 1..21: note = Synthetic oligonucleotide
  source 1..21: mol_type = other RNA
cctctcttcatcctttggctt

SEQ ID NO: 750 - RNA, 21 nt, synthetic construct
  modified_base 20..21: mod_base = OTHER; note = thymine
  misc_feature order(1,2,3,4,5,6,7,8,9,10,11,12,13,14,15,16,17,18,19): note = RNA
  misc_feature order(20,21): note = DNA
  misc_feature 1..21: note = Synthetic oligonucleotide
  source 1..21: mol_type = other RNA
tgcctctcttcatcctttgtt

SEQ ID NO: 751 - RNA, 21 nt, synthetic construct
  modified_base 20..21: mod_base = OTHER; note = thymine
  misc_feature order(1,2,3,4,5,6,7,8,9,10,11,12,13,14,15,16,17,18,19): note = RNA
  misc_feature order(20,21): note = DNA
  misc_feature 1..21: note = Synthetic oligonucleotide
  source 1..21: mol_type = other RNA
atgcctctcttcatccttttt

SEQ ID NO: 752 - RNA, 21 nt, synthetic construct
  modified_base 20..21: mod_base = OTHER; note = thymine
  misc_feature order(1,2,3,4,5,6,7,8,9,10,11,12,13,14,15,16,17,18,19): note = RNA
  misc_feature order(20,21): note = DNA
  misc_feature 1..21: note = Synthetic oligonucleotide
  source 1..21: mol_type = other RNA
acatgcctctcttcatccttt

SEQ ID NO: 753 - RNA, 21 nt, synthetic construct
  modified_base 20..21: mod_base = OTHER; note = thymine
  misc_feature order(1,2,3,4,5,6,7,8,9,10,11,12,13,14,15,16,17,18,19): note = RNA
  misc_feature order(20,21): note = DNA
  misc_feature 1..21: note = Synthetic oligonucleotide
  source 1..21: mol_type = other RNA
aacatgcctctcttcatcctt

SEQ ID NO: 754 - RNA, 21 nt, synthetic construct
  modified_base 20..21: mod_base = OTHER; note = thymine
  misc_feature order(1,2,3,4,5,6,7,8,9,10,11,12,13,14,15,16,17,18,19): note = RNA
  misc_feature order(20,21): note = DNA
  misc_feature 1..21: note = Synthetic oligonucleotide
  source 1..21: mol_type = other RNA
caacatgcctctcttcatctt

SEQ ID NO: 755 - RNA, 21 nt, synthetic construct
  modified_base 20..21: mod_base = OTHER; note = thymine
  misc_feature order(1,2,3,4,5,6,7,8,9,10,11,12,13,14,15,16,17,18,19): note = RNA
  misc_feature order(20,21): note = DNA
  misc_feature 1..21: note = Synthetic oligonucleotide
  source 1..21: mol_type = other RNA
tccaacatgcctctcttcatt

SEQ ID NO: 756 - RNA, 21 nt, synthetic construct
  modified_base 20..21: mod_base = OTHER; note = thymine
  misc_feature order(1,2,3,4,5,6,7,8,9,10,11,12,13,14,15,16,17,18,19): note = RNA
  misc_feature order(20,21): note = DNA
  misc_feature 1..21: note = Synthetic oligonucleotide
  source 1..21: mol_type = other RNA
tctccaacatgcctctctttt

SEQ ID NO: 757 - RNA, 21 nt, synthetic construct
  modified_base 20..21: mod_base = OTHER; note = thymine
  misc_feature order(1,2,3,4,5,6,7,8,9,10,11,12,13,14,15,16,17,18,19): note = RNA
  misc_feature order(20,21): note = DNA
  misc_feature 1..21: note = Synthetic oligonucleotide
  source 1..21: mol_type = other RNA
gtctccaacatgcctctcttt

SEQ ID NO: 758 - RNA, 21 nt, synthetic construct
  modified_base 20..21: mod_base = OTHER; note = thymine
  misc_feature order(1,2,3,4,5,6,7,8,9,10,11,12,13,14,15,16,17,18,19): note = RNA
  misc_feature order(20,21): note = DNA
  misc_feature 1..21: note = Synthetic oligonucleotide
  source 1..21: mol_type = other RNA
agtctccaacatgcctctctt

SEQ ID NO: 759 - RNA, 21 nt, synthetic construct
  modified_base 20..21: mod_base = OTHER; note = thymine
  misc_feature order(1,2,3,4,5,6,7,8,9,10,11,12,13,14,15,16,17,18,19): note = RNA
  misc_feature order(20,21): note = DNA
  misc_feature 1..21: note = Synthetic oligonucleotide
  source 1..21: mol_type = other RNA
aagtctccaacatgcctcttt

SEQ ID NO: 760 - RNA, 21 nt, synthetic construct
  modified_base 20..21: mod_base = OTHER; note = thymine
  misc_feature order(1,2,3,4,5,6,7,8,9,10,11,12,13,14,15,16,17,18,19): note = RNA
  misc_feature order(20,21): note = DNA
  misc_feature 1..21: note = Synthetic oligonucleotide
  source 1..21: mol_type = other RNA
caagtctccaacatgcctctt

SEQ ID NO: 761 - RNA, 21 nt, synthetic construct
  modified_base 20..21: mod_base = OTHER; note = thymine
  misc_feature order(1,2,3,4,5,6,7,8,9,10,11,12,13,14,15,16,17,18,19): note = RNA
  misc_feature order(20,21): note = DNA
  misc_feature 1..21: note = Synthetic oligonucleotide
  source 1..21: mol_type = other RNA
tgcccaagtctccaacatgtt

SEQ ID NO: 762 - RNA, 21 nt, synthetic construct
  modified_base 20..21: mod_base = OTHER; note = thymine
  misc_feature order(1,2,3,4,5,6,7,8,9,10,11,12,13,14,15,16,17,18,19): note = RNA
  misc_feature order(20,21): note = DNA
  misc_feature 1..21: note = Synthetic oligonucleotide
  source 1..21: mol_type = other RNA
ttgcccaagtctccaacattt

SEQ ID NO: 763 - RNA, 21 nt, synthetic construct
  modified_base 20..21: mod_base = OTHER; note = thymine
  misc_feature order(1,2,3,4,5,6,7,8,9,10,11,12,13,14,15,16,17,18,19): note = RNA
  misc_feature order(20,21): note = DNA
  misc_feature 1..21: note = Synthetic oligonucleotide
  source 1..21: mol_type = other RNA
attgcccaagtctccaacatt

SEQ ID NO: 764 - RNA, 21 nt, synthetic construct
  modified_base 20..21: mod_base = OTHER; note = thymine
  misc_feature order(1,2,3,4,5,6,7,8,9,10,11,12,13,14,15,16,17,18,19): note = RNA
  misc_feature order(20,21): note = DNA
  misc_feature 1..21: note = Synthetic oligonucleotide
  source 1..21: mol_type = other RNA
cattgcccaagtctccaactt

SEQ ID NO: 765 - RNA, 21 nt, synthetic construct
  modified_base 20..21: mod_base = OTHER; note = thymine
  misc_feature order(1,2,3,4,5,6,7,8,9,10,11,12,13,14,15,16,17,18,19): note = RNA
  misc_feature order(20,21): note = DNA
  misc_feature 1..21: note = Synthetic oligonucleotide
  source 1..21: mol_type = other RNA
acattgcccaagtctccaatt

SEQ ID NO: 766 - RNA, 21 nt, synthetic construct
  modified_base 20..21: mod_base = OTHER; note = thymine
  misc_feature order(1,2,3,4,5,6,7,8,9,10,11,12,13,14,15,16,17,18,19): note = RNA
  misc_feature order(20,21): note = DNA
  misc_feature 1..21: note = Synthetic oligonucleotide
  source 1..21: mol_type = other RNA
cacattgcccaagtctccatt

SEQ ID NO: 767 - RNA, 21 nt, synthetic construct
  modified_base 20..21: mod_base = OTHER; note = thymine
  misc_feature order(1,2,3,4,5,6,7,8,9,10,11,12,13,14,15,16,17,18,19): note = RNA
  misc_feature order(20,21): note = DNA
  misc_feature 1..21: note = Synthetic oligonucleotide
  source 1..21: mol_type = other RNA
tcacattgcccaagtctcctt

SEQ ID NO: 768 - RNA, 21 nt, synthetic construct
  modified_base 20..21: mod_base = OTHER; note = thymine
  misc_feature order(1,2,3,4,5,6,7,8,9,10,11,12,13,14,15,16,17,18,19): note = RNA
  misc_feature order(20,21): note = DNA
  misc_feature 1..21: note = Synthetic oligonucleotide
  source 1..21: mol_type = other RNA
agtcacattgcccaagtcttt

SEQ ID NO: 769 - RNA, 21 nt, synthetic construct
  modified_base 20..21: mod_base = OTHER; note = thymine
  misc_feature order(1,2,3,4,5,6,7,8,9,10,11,12,13,14,15,16,17,18,19): note = RNA
  misc_feature order(20,21): note = DNA
  misc_feature 1..21: note = Synthetic oligonucleotide
  source 1..21: mol_type = other RNA
agcagtcacattgcccaagtt

SEQ ID NO: 770 - RNA, 21 nt, synthetic construct
  modified_base 20..21: mod_base = OTHER; note = thymine
  misc_feature order(1,2,3,4,5,6,7,8,9,10,11,12,13,14,15,16,17,18,19): note = RNA
  misc_feature order(20,21): note = DNA
  misc_feature 1..21: note = Synthetic oligonucleotide
  source 1..21: mol_type = other RNA
tcagcagtcacattgcccatt

SEQ ID NO: 771 - RNA, 21 nt, synthetic construct
  modified_base 20..21: mod_base = OTHER; note = thymine
  misc_feature order(1,2,3,4,5,6,7,8,9,10,11,12,13,14,15,16,17,18,19): note = RNA
  misc_feature order(20,21): note = DNA
  misc_feature 1..21: note = Synthetic oligonucleotide
  source 1..21: mol_type = other RNA
tgtcagcagtcacattgcctt

SEQ ID NO: 772 - RNA, 21 nt, synthetic construct
  modified_base 20..21: mod_base = OTHER; note = thymine
  misc_feature order(1,2,3,4,5,6,7,8,9,10,11,12,13,14,15,16,17,18,19): note = RNA
  misc_feature order(20,21): note = DNA
  misc_feature 1..21: note = Synthetic oligonucleotide
  source 1..21: mol_type = other RNA
ttgtcagcagtcacattgctt

SEQ ID NO: 773 - RNA, 21 nt, synthetic construct
  modified_base 20..21: mod_base = OTHER; note = thymine
  misc_feature order(1,2,3,4,5,6,7,8,9,10,11,12,13,14,15,16,17,18,19): note = RNA
  misc_feature order(20,21): note = DNA
  misc_feature 1..21: note = Synthetic oligonucleotide
  source 1..21: mol_type = other RNA
tttgtcagcagtcacattgtt

SEQ ID NO: 774 - RNA, 21 nt, synthetic construct
  modified_base 20..21: mod_base = OTHER; note = thymine
  misc_feature order(1,2,3,4,5,6,7,8,9,10,11,12,13,14,15,16,17,18,19): note = RNA
  misc_feature order(20,21): note = DNA
  misc_feature 1..21: note = Synthetic oligonucleotide
  source 1..21: mol_type = other RNA
tctttgtcagcagtcacattt

SEQ ID NO: 775 - RNA, 21 nt, synthetic construct
  modified_base 20..21: mod_base = OTHER; note = thymine
  misc_feature order(1,2,3,4,5,6,7,8,9,10,11,12,13,14,15,16,17,18,19): note = RNA
  misc_feature order(20,21): note = DNA
  misc_feature 1..21: note = Synthetic oligonucleotide
  source 1..21: mol_type = other RNA
atctttgtcagcagtcacatt

SEQ ID NO: 776 - RNA, 21 nt, synthetic construct
  modified_base 20..21: mod_base = OTHER; note = thymine
  misc_feature order(1,2,3,4,5,6,7,8,9,10,11,12,13,14,15,16,17,18,19): note = RNA
  misc_feature order(20,21): note = DNA
  misc_feature 1..21: note = Synthetic oligonucleotide
  source 1..21: mol_type = other RNA
catctttgtcagcagtcactt

SEQ ID NO: 777 - RNA, 21 nt, synthetic construct
  modified_base 20..21: mod_base = OTHER; note = thymine
  misc_feature order(1,2,3,4,5,6,7,8,9,10,11,12,13,14,15,16,17,18,19): note = RNA
  misc_feature order(20,21): note = DNA
  misc_feature 1..21: note = Synthetic oligonucleotide
  source 1..21: mol_type = other RNA
gcatctttgtcagcagtcatt

SEQ ID NO: 778 - RNA, 21 nt, synthetic construct
  modified_base 20..21: mod_base = OTHER; note = thymine
  misc_feature order(1,2,3,4,5,6,7,8,9,10,11,12,13,14,15,16,17,18,19): note = RNA
  misc_feature order(20,21): note = DNA
  misc_feature 1..21: note = Synthetic oligonucleotide
  source 1..21: mol_type = other RNA
agcatctttgtcagcagtctt

SEQ ID NO: 779 - RNA, 21 nt, synthetic construct
  modified_base 20..21: mod_base = OTHER; note = thymine
  misc_feature order(1,2,3,4,5,6,7,8,9,10,11,12,13,14,15,16,17,18,19): note = RNA
  misc_feature order(20,21): note = DNA
  misc_feature 1..21: note = Synthetic oligonucleotide
  source 1..21: mol_type = other RNA
acagcatctttgtcagcagtt

SEQ ID NO: 780 - RNA, 21 nt, synthetic construct
  modified_base 20..21: mod_base = OTHER; note = thymine
  misc_feature order(1,2,3,4,5,6,7,8,9,10,11,12,13,14,15,16,17,18,19): note = RNA
  misc_feature order(20,21): note = DNA
  misc_feature 1..21: note = Synthetic oligonucleotide
  source 1..21: mol_type = other RNA
ggccacagcatctttgtcatt

SEQ ID NO: 781 - RNA, 21 nt, synthetic construct
  modified_base 20..21: mod_base = OTHER; note = thymine
  misc_feature order(1,2,3,4,5,6,7,8,9,10,11,12,13,14,15,16,17,18,19): note = RNA
  misc_feature order(20,21): note = DNA
  misc_feature 1..21: note = Synthetic oligonucleotide
  source 1..21: mol_type = other RNA
tcggccacagcatctttgttt

SEQ ID NO: 782 - RNA, 21 nt, synthetic construct
  modified_base 20..21: mod_base = OTHER; note = thymine
  misc_feature order(1,2,3,4,5,6,7,8,9,10,11,12,13,14,15,16,17,18,19): note = RNA
  misc_feature order(20,21): note = DNA
  misc_feature 1..21: note = Synthetic oligonucleotide
  source 1..21: mol_type = other RNA
atcggccacagcatctttgtt

SEQ ID NO: 783 - RNA, 21 nt, synthetic construct
  modified_base 20..21: mod_base = OTHER; note = thymine
  misc_feature order(1,2,3,4,5,6,7,8,9,10,11,12,13,14,15,16,17,18,19): note = RNA
  misc_feature order(20,21): note = DNA
  misc_feature 1..21: note = Synthetic oligonucleotide
  source 1..21: mol_type = other RNA
acatcggccacagcatctttt

SEQ ID NO: 784 - RNA, 21 nt, synthetic construct
  modified_base 20..21: mod_base = OTHER; note = thymine
  misc_feature order(1,2,3,4,5,6,7,8,9,10,11,12,13,14,15,16,17,18,19): note = RNA
  misc_feature order(20,21): note = DNA
  misc_feature 1..21: note = Synthetic oligonucleotide
  source 1..21: mol_type = other RNA
cacatcggccacagcatcttt

SEQ ID NO: 785 - RNA, 21 nt, synthetic construct
  modified_base 20..21: mod_base = OTHER; note = thymine
  misc_feature order(1,2,3,4,5,6,7,8,9,10,11,12,13,14,15,16,17,18,19): note = RNA
  misc_feature order(20,21): note = DNA
  misc_feature 1..21: note = Synthetic oligonucleotide
  source 1..21: mol_type = other RNA
agacacatcggccacagcatt

SEQ ID NO: 786 - RNA, 21 nt, synthetic construct
  modified_base 20..21: mod_base = OTHER; note = thymine
  misc_feature order(1,2,3,4,5,6,7,8,9,10,11,12,13,14,15,16,17,18,19): note = RNA
  misc_feature order(20,21): note = DNA
  misc_feature 1..21: note = Synthetic oligonucleotide
  source 1..21: mol_type = other RNA
tagacacatcggccacagctt

SEQ ID NO: 787 - RNA, 21 nt, synthetic construct
  modified_base 20..21: mod_base = OTHER; note = thymine
  misc_feature order(1,2,3,4,5,6,7,8,9,10,11,12,13,14,15,16,17,18,19): note = RNA
  misc_feature order(20,21): note = DNA
  misc_feature 1..21: note = Synthetic oligonucleotide
  source 1..21: mol_type = other RNA
atagacacatcggccacagtt

SEQ ID NO: 788 - RNA, 21 nt, synthetic construct
  modified_base 20..21: mod_base = OTHER; note = thymine
  misc_feature order(1,2,3,4,5,6,7,8,9,10,11,12,13,14,15,16,17,18,19): note = RNA
  misc_feature order(20,21): note = DNA
  misc_feature 1..21: note = Synthetic oligonucleotide
  source 1..21: mol_type = other RNA
aatagacacatcggccacatt

SEQ ID NO: 789 - RNA, 21 nt, synthetic construct
  modified_base 20..21: mod_base = OTHER; note = thymine
  misc_feature order(1,2,3,4,5,6,7,8,9,10,11,12,13,14,15,16,17,18,19): note = RNA
  misc_feature order(20,21): note = DNA
  misc_feature 1..21: note = Synthetic oligonucleotide
  source 1..21: mol_type = other RNA
caatagacacatcggccactt

SEQ ID NO: 790 - RNA, 21 nt, synthetic construct
  modified_base 20..21: mod_base = OTHER; note = thymine
  misc_feature order(1,2,3,4,5,6,7,8,9,10,11,12,13,14,15,16,17,18,19): note = RNA
  misc_feature order(20,21): note = DNA
  misc_feature 1..21: note = Synthetic oligonucleotide
  source 1..21: mol_type = other RNA
tcaatagacacatcggccatt

SEQ ID NO: 791 - RNA, 21 nt, synthetic construct
  modified_base 20..21: mod_base = OTHER; note = thymine
  misc_feature order(1,2,3,4,5,6,7,8,9,10,11,12,13,14,15,16,17,18,19): note = RNA
  misc_feature order(20,21): note = DNA
  misc_feature 1..21: note = Synthetic oligonucleotide
  source 1..21: mol_type = other RNA
ttcaatagacacatcggcctt

SEQ ID NO: 792 - RNA, 21 nt, synthetic construct
  modified_base 20..21: mod_base = OTHER; note = thymine
  misc_feature order(1,2,3,4,5,6,7,8,9,10,11,12,13,14,15,16,17,18,19): note = RNA
  misc_feature order(20,21): note = DNA
  misc_feature 1..21: note = Synthetic oligonucleotide
  source 1..21: mol_type = other RNA
cttcaatagacacatcggctt

SEQ ID NO: 793 - RNA, 21 nt, synthetic construct
  modified_base 20..21: mod_base = OTHER; note = thymine
  misc_feature order(1,2,3,4,5,6,7,8,9,10,11,12,13,14,15,16,17,18,19): note = RNA
  misc_feature order(20,21): note = DNA
  misc_feature 1..21: note = Synthetic oligonucleotide
  source 1..21: mol_type = other RNA
tcttcaatagacacatcggtt

SEQ ID NO: 794 - RNA, 21 nt, synthetic construct
  modified_base 20..21: mod_base = OTHER; note = thymine
  misc_feature order(1,2,3,4,5,6,7,8,9,10,11,12,13,14,15,16,17,18,19): note = RNA
  misc_feature order(20,21): note = DNA
  misc_feature 1..21: note = Synthetic oligonucleotide
  source 1..21: mol_type = other RNA
atcttcaatagacacatcgtt

SEQ ID NO: 795 - RNA, 21 nt, synthetic construct
  modified_base 20..21: mod_base = OTHER; note = thymine
  misc_feature order(1,2,3,4,5,6,7,8,9,10,11,12,13,14,15,16,17,18,19): note = RNA
  misc_feature order(20,21): note = DNA
  misc_feature 1..21: note = Synthetic oligonucleotide
  source 1..21: mol_type = other RNA
gagatcacagaatcttcaatt

SEQ ID NO: 796 - RNA, 21 nt, synthetic construct
  modified_base 20..21: mod_base = OTHER; note = thymine
  misc_feature order(1,2,3,4,5,6,7,8,9,10,11,12,13,14,15,16,17,18,19): note = RNA
  misc_feature order(20,21): note = DNA
  misc_feature 1..21: note = Synthetic oligonucleotide
  source 1..21: mol_type = other RNA
tgagatcacagaatcttcatt

SEQ ID NO: 797 - RNA, 21 nt, synthetic construct
  modified_base 20..21: mod_base = OTHER; note = thymine
  misc_feature order(1,2,3,4,5,6,7,8,9,10,11,12,13,14,15,16,17,18,19): note = RNA
  misc_feature order(20,21): note = DNA
  misc_feature 1..21: note = Synthetic oligonucleotide
  source 1..21: mol_type = other RNA
gtgagatcacagaatcttctt

SEQ ID NO: 798 - RNA, 21 nt, synthetic construct
  modified_base 20..21: mod_base = OTHER; note = thymine
  misc_feature order(1,2,3,4,5,6,7,8,9,10,11,12,13,14,15,16,17,18,19): note = RNA
  misc_feature order(20,21): note = DNA
  misc_feature 1..21: note = Synthetic oligonucleotide
  source 1..21: mol_type = other RNA
agtgagatcacagaatctttt

SEQ ID NO: 799 - RNA, 21 nt, synthetic construct
  modified_base 20..21: mod_base = OTHER; note = thymine
  misc_feature order(1,2,3,4,5,6,7,8,9,10,11,12,13,14,15,16,17,18,19): note = RNA
  misc_feature order(20,21): note = DNA
  misc_feature 1..21: note = Synthetic oligonucleotide
  source 1..21: mol_type = other RNA
gagtgagatcacagaatcttt

SEQ ID NO: 800 - RNA, 21 nt, synthetic construct
  modified_base 20..21: mod_base = OTHER; note = thymine
  misc_feature order(1,2,3,4,5,6,7,8,9,10,11,12,13,14,15,16,17,18,19): note = RNA
  misc_feature order(20,21): note = DNA
  misc_feature 1..21: note = Synthetic oligonucleotide
  source 1..21: mol_type = other RNA
agagtgagatcacagaatctt

SEQ ID NO: 801 - RNA, 21 nt, synthetic construct
  modified_base 20..21: mod_base = OTHER; note = thymine
  misc_feature order(1,2,3,4,5,6,7,8,9,10,11,12,13,14,15,16,17,18,19): note = RNA
  misc_feature order(20,21): note = DNA
  misc_feature 1..21: note = Synthetic oligonucleotide
  source 1..21: mol_type = other RNA
gagagtgagatcacagaattt

SEQ ID NO: 802 - RNA, 21 nt, synthetic construct
  modified_base 20..21: mod_base = OTHER; note = thymine
  misc_feature order(1,2,3,4,5,6,7,8,9,10,11,12,13,14,15,16,17,18,19): note = RNA
  misc_feature order(20,21): note = DNA
  misc_feature 1..21: note = Synthetic oligonucleotide
  source 1..21: mol_type = other RNA
tgagagtgagatcacagaatt

SEQ ID NO: 803 - RNA, 21 nt, synthetic construct
  modified_base 20..21: mod_base = OTHER; note = thymine
  misc_feature order(1,2,3,4,5,6,7,8,9,10,11,12,13,14,15,16,17,18,19): note = RNA
  misc_feature order(20,21): note = DNA
  misc_feature 1..21: note = Synthetic oligonucleotide
  source 1..21: mol_type = other RNA
ctgagagtgagatcacagatt

SEQ ID NO: 804 - RNA, 21 nt, synthetic construct
  modified_base 20..21: mod_base = OTHER; note = thymine
  misc_feature order(1,2,3,4,5,6,7,8,9,10,11,12,13,14,15,16,17,18,19): note = RNA
  misc_feature order(20,21): note = DNA
  misc_feature 1..21: note = Synthetic oligonucleotide
  source 1..21: mol_type = other RNA
tcctgagagtgagatcacatt

SEQ ID NO: 805 - RNA, 21 nt, synthetic construct
  modified_base 20..21: mod_base = OTHER; note = thymine
  misc_feature order(1,2,3,4,5,6,7,8,9,10,11,12,13,14,15,16,17,18,19): note = RNA
  misc_feature order(20,21): note = DNA
  misc_feature 1..21: note = Synthetic oligonucleotide
  source 1..21: mol_type = other RNA
tctcctgagagtgagatcatt

SEQ ID NO: 806 - RNA, 21 nt, synthetic construct
  modified_base 20..21: mod_base = OTHER; note = thymine
  misc_feature order(1,2,3,4,5,6,7,8,9,10,11,12,13,14,15,16,17,18,19): note = RNA
  misc_feature order(20,21): note = DNA
  misc_feature 1..21: note = Synthetic oligonucleotide
  source 1..21: mol_type = other RNA
tggtctcctgagagtgagatt

SEQ ID NO: 807 - RNA, 21 nt, synthetic construct
  modified_base 20..21: mod_base = OTHER; note = thymine
  misc_feature order(1,2,3,4,5,6,7,8,9,10,11,12,13,14,15,16,17,18,19): note = RNA
  misc_feature order(20,21): note = DNA
  misc_feature 1..21: note = Synthetic oligonucleotide
  source 1..21: mol_type = other RNA
atggtctcctgagagtgagtt

SEQ ID NO: 808 - RNA, 21 nt, synthetic construct
  modified_base 20..21: mod_base = OTHER; note = thymine
  misc_feature order(1,2,3,4,5,6,7,8,9,10,11,12,13,14,15,16,17,18,19): note = RNA
  misc_feature order(20,21): note = DNA
  misc_feature 1..21: note = Synthetic oligonucleotide
  source 1..21: mol_type = other RNA
aatggtctcctgagagtgatt

SEQ ID NO: 809 - RNA, 21 nt, synthetic construct
  modified_base 20..21: mod_base = OTHER; note = thymine
  misc_feature order(1,2,3,4,5,6,7,8,9,10,11,12,13,14,15,16,17,18,19): note = RNA
  misc_feature order(20,21): note = DNA
  misc_feature 1..21: note = Synthetic oligonucleotide
  source 1..21: mol_type = other RNA
caatggtctcctgagagtgtt

SEQ ID NO: 810 - RNA, 21 nt, synthetic construct
  modified_base 20..21: mod_base = OTHER; note = thymine
  misc_feature order(1,2,3,4,5,6,7,8,9,10,11,12,13,14,15,16,17,18,19): note = RNA
  misc_feature order(20,21): note = DNA
  misc_feature 1..21: note = Synthetic oligonucleotide
  source 1..21: mol_type = other RNA
gcaatggtctcctgagagttt

SEQ ID NO: 811 - RNA, 21 nt, synthetic construct
  modified_base 20..21: mod_base = OTHER; note = thymine
  misc_feature order(1,2,3,4,5,6,7,8,9,10,11,12,13,14,15,16,17,18,19): note = RNA
  misc_feature order(20,21): note = DNA
  misc_feature 1..21: note = Synthetic oligonucleotide
  source 1..21: mol_type = other RNA
tgcaatggtctcctgagagtt

SEQ ID NO: 812 - RNA, 21 nt, synthetic construct
  modified_base 20..21: mod_base = OTHER; note = thymine
  misc_feature order(1,2,3,4,5,6,7,8,9,10,11,12,13,14,15,16,17,18,19): note = RNA
  misc_feature order(20,21): note = DNA
  misc_feature 1..21: note = Synthetic oligonucleotide
  source 1..21: mol_type = other RNA
atgcaatggtctcctgagatt

SEQ ID NO: 813 - RNA, 21 nt, synthetic construct
  modified_base 20..21: mod_base = OTHER; note = thymine
  misc_feature order(1,2,3,4,5,6,7,8,9,10,11,12,13,14,15,16,17,18,19): note = RNA
  misc_feature order(20,21): note = DNA
  misc_feature 1..21: note = Synthetic oligonucleotide
  source 1..21: mol_type = other RNA
tgatgcaatggtctcctgatt

SEQ ID NO: 814 - RNA, 21 nt, synthetic construct
  modified_base 20..21: mod_base = OTHER; note = thymine
  misc_feature order(1,2,3,4,5,6,7,8,9,10,11,12,13,14,15,16,17,18,19): note = RNA
  misc_feature order(20,21): note = DNA
  misc_feature 1..21: note = Synthetic oligonucleotide
  source 1..21: mol_type = other RNA
atgatgcaatggtctcctgtt

SEQ ID NO: 815 - RNA, 21 nt, synthetic construct
  modified_base 20..21: mod_base = OTHER; note = thymine
  misc_feature order(1,2,3,4,5,6,7,8,9,10,11,12,13,14,15,16,17,18,19): note = RNA
  misc_feature order(20,21): note = DNA
  misc_feature 1..21: note = Synthetic oligonucleotide
  source 1..21: mol_type = other RNA
aatgatgcaatggtctccttt

SEQ ID NO: 816 - RNA, 21 nt, synthetic construct
  modified_base 20..21: mod_base = OTHER; note = thymine
  misc_feature order(1,2,3,4,5,6,7,8,9,10,11,12,13,14,15,16,17,18,19): note = RNA
  misc_feature order(20,21): note = DNA
  misc_feature 1..21: note = Synthetic oligonucleotide
  source 1..21: mol_type = other RNA
caatgatgcaatggtctcctt

SEQ ID NO: 817 - RNA, 21 nt, synthetic construct
  modified_base 20..21: mod_base = OTHER; note = thymine
  misc_feature order(1,2,3,4,5,6,7,8,9,10,11,12,13,14,15,16,17,18,19): note = RNA
  misc_feature order(20,21): note = DNA
  misc_feature 1..21: note = Synthetic oligonucleotide
  source 1..21: mol_type = other RNA
ccaatgatgcaatggtctctt

SEQ ID NO: 818 - RNA, 21 nt, synthetic construct
  modified_base 20..21: mod_base = OTHER; note = thymine
  misc_feature order(1,2,3,4,5,6,7,8,9,10,11,12,13,14,15,16,17,18,19): note = RNA
  misc_feature order(20,21): note = DNA
  misc_feature 1..21: note = Synthetic oligonucleotide
  source 1..21: mol_type = other RNA
gccaatgatgcaatggtcttt

SEQ ID NO: 819 - RNA, 21 nt, synthetic construct
  modified_base 20..21: mod_base = OTHER; note = thymine
  misc_feature order(1,2,3,4,5,6,7,8,9,10,11,12,13,14,15,16,17,18,19): note = RNA
  misc_feature order(20,21): note = DNA
  misc_feature 1..21: note = Synthetic oligonucleotide
  source 1..21: mol_type = other RNA
tgtgcggccaatgatgcaatt

SEQ ID NO: 820 - RNA, 21 nt, synthetic construct
  modified_base 20..21: mod_base = OTHER; note = thymine
  misc_feature order(1,2,3,4,5,6,7,8,9,10,11,12,13,14,15,16,17,18,19): note = RNA
  misc_feature order(20,21): note = DNA
  misc_feature 1..21: note = Synthetic oligonucleotide
  source 1..21: mol_type = other RNA
agtgtgcggccaatgatgctt

SEQ ID NO: 821 - RNA, 21 nt, synthetic construct
  modified_base 20..21: mod_base = OTHER; note = thymine
  misc_feature order(1,2,3,4,5,6,7,8,9,10,11,12,13,14,15,16,17,18,19): note = RNA
  misc_feature order(20,21): note = DNA
  misc_feature 1..21: note = Synthetic oligonucleotide
  source 1..21: mol_type = other RNA
accagtgtgcggccaatgatt

SEQ ID NO: 822 - RNA, 21 nt, synthetic construct
  modified_base 20..21: mod_base = OTHER; note = thymine
  misc_feature order(1,2,3,4,5,6,7,8,9,10,11,12,13,14,15,16,17,18,19): note = RNA
  misc_feature order(20,21): note = DNA
  misc_feature 1..21: note = Synthetic oligonucleotide
  source 1..21: mol_type = other RNA
tggaccaccagtgtgcggctt

SEQ ID NO: 823 - RNA, 21 nt, synthetic construct
  modified_base 20..21: mod_base = OTHER; note = thymine
  misc_feature order(1,2,3,4,5,6,7,8,9,10,11,12,13,14,15,16,17,18,19): note = RNA
  misc_feature order(20,21): note = DNA
  misc_feature 1..21: note = Synthetic oligonucleotide
  source 1..21: mol_type = other RNA
tcatggaccaccagtgtgctt

SEQ ID NO: 824 - RNA, 21 nt, synthetic construct
  modified_base 20..21: mod_base = OTHER; note = thymine
  misc_feature order(1,2,3,4,5,6,7,8,9,10,11,12,13,14,15,16,17,18,19): note = RNA
  misc_feature order(20,21): note = DNA
  misc_feature 1..21: note = Synthetic oligonucleotide
  source 1..21: mol_type = other RNA
ttcatggaccaccagtgtgtt

SEQ ID NO: 825 - RNA, 21 nt, synthetic construct
  modified_base 20..21: mod_base = OTHER; note = thymine
  misc_feature order(1,2,3,4,5,6,7,8,9,10,11,12,13,14,15,16,17,18,19): note = RNA
  misc_feature order(20,21): note = DNA
  misc_feature 1..21: note = Synthetic oligonucleotide
  source 1..21: mol_type = other RNA
tttcatggaccaccagtgttt

SEQ ID NO: 826 - RNA, 21 nt, synthetic construct
  modified_base 20..21: mod_base = OTHER; note = thymine
  misc_feature order(1,2,3,4,5,6,7,8,9,10,11,12,13,14,15,16,17,18,19): note = RNA
  misc_feature order(20,21): note = DNA
  misc_feature 1..21: note = Synthetic oligonucleotide
  source 1..21: mol_type = other RNA
ttttcatggaccaccagtgtt

SEQ ID NO: 827 - RNA, 21 nt, synthetic construct
  modified_base 20..21: mod_base = OTHER; note = thymine
  misc_feature order(1,2,3,4,5,6,7,8,9,10,11,12,13,14,15,16,17,18,19): note = RNA
  misc_feature order(20,21): note = DNA
  misc_feature 1..21: note = Synthetic oligonucleotide
  source 1..21: mol_type = other RNA
tttttcatggaccaccagttt

SEQ ID NO: 828 - RNA, 21 nt, synthetic construct
  modified_base 20..21: mod_base = OTHER; note = thymine
  misc_feature order(1,2,3,4,5,6,7,8,9,10,11,12,13,14,15,16,17,18,19): note = RNA
  misc_feature order(20,21): note = DNA
  misc_feature 1..21: note = Synthetic oligonucleotide
  source 1..21: mol_type = other RNA
ctttttcatggaccaccagtt

SEQ ID NO: 829 - RNA, 21 nt, synthetic construct
  modified_base 20..21: mod_base = OTHER; note = thymine
  misc_feature order(1,2,3,4,5,6,7,8,9,10,11,12,13,14,15,16,17,18,19): note = RNA
  misc_feature order(20,21): note = DNA
  misc_feature 1..21: note = Synthetic oligonucleotide
  source 1..21: mol_type = other RNA
gctttttcatggaccaccatt

SEQ ID NO: 830 - RNA, 21 nt, synthetic construct
  modified_base 20..21: mod_base = OTHER; note = thymine
  misc_feature order(1,2,3,4,5,6,7,8,9,10,11,12,13,14,15,16,17,18,19): note = RNA
  misc_feature order(20,21): note = DNA
  misc_feature 1..21: note = Synthetic oligonucleotide
  source 1..21: mol_type = other RNA
tgctttttcatggaccacctt

SEQ ID NO: 831 - RNA, 21 nt, synthetic construct
  modified_base 20..21: mod_base = OTHER; note = thymine
  misc_feature order(1,2,3,4,5,6,7,8,9,10,11,12,13,14,15,16,17,18,19): note = RNA
  misc_feature order(20,21): note = DNA
  misc_feature 1..21: note = Synthetic oligonucleotide
  source 1..21: mol_type = other RNA
tctgctttttcatggaccatt

SEQ ID NO: 832 - RNA, 21 nt, synthetic construct
  modified_base 20..21: mod_base = OTHER; note = thymine
  misc_feature order(1,2,3,4,5,6,7,8,9,10,11,12,13,14,15,16,17,18,19): note = RNA
  misc_feature order(20,21): note = DNA
  misc_feature 1..21: note = Synthetic oligonucleotide
  source 1..21: mol_type = other RNA
atctgctttttcatggacctt

SEQ ID NO: 833 - RNA, 21 nt, synthetic construct
  modified_base 20..21: mod_base = OTHER; note = thymine
  misc_feature order(1,2,3,4,5,6,7,8,9,10,11,12,13,14,15,16,17,18,19): note = RNA
  misc_feature order(20,21): note = DNA
  misc_feature 1..21: note = Synthetic oligonucleotide
  source 1..21: mol_type = other RNA
tcatctgctttttcatggatt

SEQ ID NO: 834 - RNA, 21 nt, synthetic construct
  modified_base 20..21: mod_base = OTHER; note = thymine
  misc_feature order(1,2,3,4,5,6,7,8,9,10,11,12,13,14,15,16,17,18,19): note = RNA
  misc_feature order(20,21): note = DNA
  misc_feature 1..21: note = Synthetic oligonucleotide
  source 1..21: mol_type = other RNA
gtcatctgctttttcatggtt

SEQ ID NO: 835 - RNA, 21 nt, synthetic construct
  modified_base 20..21: mod_base = OTHER; note = thymine
  misc_feature order(1,2,3,4,5,6,7,8,9,10,11,12,13,14,15,16,17,18,19): note = RNA
  misc_feature order(20,21): note = DNA
  misc_feature 1..21: note = Synthetic oligonucleotide
  source 1..21: mol_type = other RNA
agtcatctgctttttcatgtt

SEQ ID NO: 836 - RNA, 21 nt, synthetic construct
  modified_base 20..21: mod_base = OTHER; note = thymine
  misc_feature order(1,2,3,4,5,6,7,8,9,10,11,12,13,14,15,16,17,18,19): note = RNA
  misc_feature order(20,21): note = DNA
  misc_feature 1..21: note = Synthetic oligonucleotide
  source 1..21: mol_type = other RNA
caagtcatctgctttttcatt

SEQ ID NO: 837 - RNA, 21 nt, synthetic construct
  modified_base 20..21: mod_base = OTHER; note = thymine
  misc_feature order(1,2,3,4,5,6,7,8,9,10,11,12,13,14,15,16,17,18,19): note = RNA
  misc_feature order(20,21): note = DNA
  misc_feature 1..21: note = Synthetic oligonucleotide
  source 1..21: mol_type = other RNA
cccaagtcatctgcttttttt

SEQ ID NO: 838 - RNA, 21 nt, synthetic construct
  modified_base 20..21: mod_base = OTHER; note = thymine
  misc_feature order(1,2,3,4,5,6,7,8,9,10,11,12,13,14,15,16,17,18,19): note = RNA
  misc_feature order(20,21): note = DNA
  misc_feature 1..21: note = Synthetic oligonucleotide
  source 1..21: mol_type = other RNA
gcccaagtcatctgctttttt

SEQ ID NO: 839 - RNA, 21 nt, synthetic construct
  modified_base 20..21: mod_base = OTHER; note = thymine
  misc_feature order(1,2,3,4,5,6,7,8,9,10,11,12,13,14,15,16,17,18,19): note = RNA
  misc_feature order(20,21): note = DNA
  misc_feature 1..21: note = Synthetic oligonucleotide
  source 1..21: mol_type = other RNA
tgcccaagtcatctgcttttt

SEQ ID NO: 840 - RNA, 21 nt, synthetic construct
  modified_base 20..21: mod_base = OTHER; note = thymine
  misc_feature order(1,2,3,4,5,6,7,8,9,10,11,12,13,14,15,16,17,18,19): note = RNA
  misc_feature order(20,21): note = DNA
  misc_feature 1..21: note = Synthetic oligonucleotide
  source 1..21: mol_type = other RNA
ttgcccaagtcatctgctttt

SEQ ID NO: 841 - RNA, 21 nt, synthetic construct
  modified_base 20..21: mod_base = OTHER; note = thymine
  misc_feature order(1,2,3,4,5,6,7,8,9,10,11,12,13,14,15,16,17,18,19): note = RNA
  misc_feature order(20,21): note = DNA
  misc_feature 1..21: note = Synthetic oligonucleotide
  source 1..21: mol_type = other RNA
tttgcccaagtcatctgcttt

SEQ ID NO: 842 - RNA, 21 nt, synthetic construct
  modified_base 20..21: mod_base = OTHER; note = thymine
  misc_feature order(1,2,3,4,5,6,7,8,9,10,11,12,13,14,15,16,17,18,19): note = RNA
  misc_feature order(20,21): note = DNA
  misc_feature 1..21: note = Synthetic oligonucleotide
  source 1..21: mol_type = other RNA
ctttgcccaagtcatctgctt

SEQ ID NO: 843 - RNA, 21 nt, synthetic construct
  modified_base 20..21: mod_base = OTHER; note = thymine
  misc_feature order(1,2,3,4,5,6,7,8,9,10,11,12,13,14,15,16,17,18,19): note = RNA
  misc_feature order(20,21): note = DNA
  misc_feature 1..21: note = Synthetic oligonucleotide
  source 1..21: mol_type = other RNA
cctttgcccaagtcatctgtt

SEQ ID NO: 844 - RNA, 21 nt, synthetic construct
  modified_base 20..21: mod_base = OTHER; note = thymine
  misc_feature order(1,2,3,4,5,6,7,8,9,10,11,12,13,14,15,16,17,18,19): note = RNA
  misc_feature order(20,21): note = DNA
  misc_feature 1..21: note = Synthetic oligonucleotide
  source 1..21: mol_type = other RNA
acctttgcccaagtcatcttt

SEQ ID NO: 845 - RNA, 21 nt, synthetic construct
  modified_base 20..21: mod_base = OTHER; note = thymine
  misc_feature order(1,2,3,4,5,6,7,8,9,10,11,12,13,14,15,16,17,18,19): note = RNA
  misc_feature order(20,21): note = DNA
  misc_feature 1..21: note = Synthetic oligonucleotide
  source 1..21: mol_type = other RNA
tccacctttgcccaagtcatt

SEQ ID NO: 846 - RNA, 21 nt, synthetic construct
  modified_base 20..21: mod_base = OTHER; note = thymine
  misc_feature order(1,2,3,4,5,6,7,8,9,10,11,12,13,14,15,16,17,18,19): note = RNA
  misc_feature order(20,21): note = DNA
  misc_feature 1..21: note = Synthetic oligonucleotide
  source 1..21: mol_type = other RNA
ttccacctttgcccaagtctt

SEQ ID NO: 847 - RNA, 21 nt, synthetic construct
  modified_base 20..21: mod_base = OTHER; note = thymine
  misc_feature order(1,2,3,4,5,6,7,8,9,10,11,12,13,14,15,16,17,18,19): note = RNA
  misc_feature order(20,21): note = DNA
  misc_feature 1..21: note = Synthetic oligonucleotide
  source 1..21: mol_type = other RNA
tttccacctttgcccaagttt

SEQ ID NO: 848 - RNA, 21 nt, synthetic construct
  modified_base 20..21: mod_base = OTHER; note = thymine
  misc_feature order(1,2,3,4,5,6,7,8,9,10,11,12,13,14,15,16,17,18,19): note = RNA
  misc_feature order(20,21): note = DNA
  misc_feature 1..21: note = Synthetic oligonucleotide
  source 1..21: mol_type = other RNA
atttccacctttgcccaagtt

SEQ ID NO: 849 - RNA, 21 nt, synthetic construct
  modified_base 20..21: mod_base = OTHER; note = thymine
  misc_feature order(1,2,3,4,5,6,7,8,9,10,11,12,13,14,15,16,17,18,19): note = RNA
  misc_feature order(20,21): note = DNA
  misc_feature 1..21: note = Synthetic oligonucleotide
  source 1..21: mol_type = other RNA
catttccacctttgcccaatt

SEQ ID NO: 850 - RNA, 21 nt, synthetic construct
  modified_base 20..21: mod_base = OTHER; note = thymine
  misc_feature order(1,2,3,4,5,6,7,8,9,10,11,12,13,14,15,16,17,18,19): note = RNA
  misc_feature order(20,21): note = DNA
  misc_feature 1..21: note = Synthetic oligonucleotide
  source 1..21: mol_type = other RNA
tcatttccacctttgcccatt

SEQ ID NO: 851 - RNA, 21 nt, synthetic construct
  modified_base 20..21: mod_base = OTHER; note = thymine
  misc_feature order(1,2,3,4,5,6,7,8,9,10,11,12,13,14,15,16,17,18,19): note = RNA
  misc_feature order(20,21): note = DNA
  misc_feature 1..21: note = Synthetic oligonucleotide
  source 1..21: mol_type = other RNA
ttcatttccacctttgccctt

SEQ ID NO: 852 - RNA, 21 nt, synthetic construct
  modified_base 20..21: mod_base = OTHER; note = thymine
  misc_feature order(1,2,3,4,5,6,7,8,9,10,11,12,13,14,15,16,17,18,19): note = RNA
  misc_feature order(20,21): note = DNA
  misc_feature 1..21: note = Synthetic oligonucleotide
  source 1..21: mol_type = other RNA
cttcatttccacctttgcctt

SEQ ID NO: 853 - RNA, 21 nt, synthetic construct
  modified_base 20..21: mod_base = OTHER; note = thymine
  misc_feature order(1,2,3,4,5,6,7,8,9,10,11,12,13,14,15,16,17,18,19): note = RNA
  misc_feature order(20,21): note = DNA
  misc_feature 1..21: note = Synthetic oligonucleotide
  source 1..21: mol_type = other RNA
tcttcatttccacctttgctt

SEQ ID NO: 854 - RNA, 21 nt, synthetic construct
  modified_base 20..21: mod_base = OTHER; note = thymine
  misc_feature order(1,2,3,4,5,6,7,8,9,10,11,12,13,14,15,16,17,18,19): note = RNA
  misc_feature order(20,21): note = DNA
  misc_feature 1..21: note = Synthetic oligonucleotide
  source 1..21: mol_type = other RNA
ttcttcatttccacctttgtt

SEQ ID NO: 855 - RNA, 21 nt, synthetic construct
  modified_base 20..21: mod_base = OTHER; note = thymine
  misc_feature order(1,2,3,4,5,6,7,8,9,10,11,12,13,14,15,16,17,18,19): note = RNA
  misc_feature order(20,21): note = DNA
  misc_feature 1..21: note = Synthetic oligonucleotide
  source 1..21: mol_type = other RNA
ctttcttcatttccacctttt

SEQ ID NO: 856 - RNA, 21 nt, synthetic construct
  modified_base 20..21: mod_base = OTHER; note = thymine
  misc_feature order(1,2,3,4,5,6,7,8,9,10,11,12,13,14,15,16,17,18,19): note = RNA
  misc_feature order(20,21): note = DNA
  misc_feature 1..21: note = Synthetic oligonucleotide
  source 1..21: mol_type = other RNA
actttcttcatttccaccttt

SEQ ID NO: 857 - RNA, 21 nt, synthetic construct
  modified_base 20..21: mod_base = OTHER; note = thymine
  misc_feature order(1,2,3,4,5,6,7,8,9,10,11,12,13,14,15,16,17,18,19): note = RNA
  misc_feature order(20,21): note = DNA
  misc_feature 1..21: note = Synthetic oligonucleotide
  source 1..21: mol_type = other RNA
tactttcttcatttccacctt

SEQ ID NO: 858 - RNA, 21 nt, synthetic construct
  modified_base 20..21: mod_base = OTHER; note = thymine
  misc_feature order(1,2,3,4,5,6,7,8,9,10,11,12,13,14,15,16,17,18,19): note = RNA
  misc_feature order(20,21): note = DNA
  misc_feature 1..21: note = Synthetic oligonucleotide
  source 1..21: mol_type = other RNA
gtactttcttcatttccactt

SEQ ID NO: 859 - RNA, 21 nt, synthetic construct
  modified_base 20..21: mod_base = OTHER; note = thymine
  misc_feature order(1,2,3,4,5,6,7,8,9,10,11,12,13,14,15,16,17,18,19): note = RNA
  misc_feature order(20,21): note = DNA
  misc_feature 1..21: note = Synthetic oligonucleotide
  source 1..21: mol_type = other RNA
ctgtctttgtactttcttctt

SEQ ID NO: 860 - RNA, 21 nt, synthetic construct
  modified_base 20..21: mod_base = OTHER; note = thymine
  misc_feature order(1,2,3,4,5,6,7,8,9,10,11,12,13,14,15,16,17,18,19): note = RNA
  misc_feature order(20,21): note = DNA
  misc_feature 1..21: note = Synthetic oligonucleotide
  source 1..21: mol_type = other RNA
tcctgtctttgtactttcttt

SEQ ID NO: 861 - RNA, 21 nt, synthetic construct
  modified_base 20..21: mod_base = OTHER; note = thymine
  misc_feature order(1,2,3,4,5,6,7,8,9,10,11,12,13,14,15,16,17,18,19): note = RNA
  misc_feature order(20,21): note = DNA
  misc_feature 1..21: note = Synthetic oligonucleotide
  source 1..21: mol_type = other RNA
ttcctgtctttgtactttctt

SEQ ID NO: 862 - RNA, 21 nt, synthetic construct
  modified_base 20..21: mod_base = OTHER; note = thymine
  misc_feature order(1,2,3,4,5,6,7,8,9,10,11,12,13,14,15,16,17,18,19): note = RNA
  misc_feature order(20,21): note = DNA
  misc_feature 1..21: note = Synthetic oligonucleotide
  source 1..21: mol_type = other RNA
gtttcctgtctttgtactttt

SEQ ID NO: 863 - RNA, 21 nt, synthetic construct
  modified_base 20..21: mod_base = OTHER; note = thymine
  misc_feature order(1,2,3,4,5,6,7,8,9,10,11,12,13,14,15,16,17,18,19): note = RNA
  misc_feature order(20,21): note = DNA
  misc_feature 1..21: note = Synthetic oligonucleotide
  source 1..21: mol_type = other RNA
agcgtttcctgtctttgtatt

SEQ ID NO: 864 - RNA, 21 nt, synthetic construct
  modified_base 20..21: mod_base = OTHER; note = thymine
  misc_feature order(1,2,3,4,5,6,7,8,9,10,11,12,13,14,15,16,17,18,19): note = RNA
  misc_feature order(20,21): note = DNA
  misc_feature 1..21: note = Synthetic oligonucleotide
  source 1..21: mol_type = other RNA
tccagcgtttcctgtcttttt

SEQ ID NO: 865 - RNA, 21 nt, synthetic construct
  modified_base 20..21: mod_base = OTHER; note = thymine
  misc_feature order(1,2,3,4,5,6,7,8,9,10,11,12,13,14,15,16,17,18,19): note = RNA
  misc_feature order(20,21): note = DNA
  misc_feature 1..21: note = Synthetic oligonucleotide
  source 1..21: mol_type = other RNA
ttccagcgtttcctgtctttt

SEQ ID NO: 866 - RNA, 21 nt, synthetic construct
  modified_base 20..21: mod_base = OTHER; note = thymine
  misc_feature order(1,2,3,4,5,6,7,8,9,10,11,12,13,14,15,16,17,18,19): note = RNA
  misc_feature order(20,21): note = DNA
  misc_feature 1..21: note = Synthetic oligonucleotide
  source 1..21: mol_type = other RNA
cttccagcgtttcctgtcttt

SEQ ID NO: 867 - RNA, 21 nt, synthetic construct
  modified_base 20..21: mod_base = OTHER; note = thymine
  misc_feature order(1,2,3,4,5,6,7,8,9,10,11,12,13,14,15,16,17,18,19): note = RNA
  misc_feature order(20,21): note = DNA
  misc_feature 1..21: note = Synthetic oligonucleotide
  source 1..21: mol_type = other RNA
acttccagcgtttcctgtctt

SEQ ID NO: 868 - RNA, 21 nt, synthetic construct
  modified_base 20..21: mod_base = OTHER; note = thymine
  misc_feature order(1,2,3,4,5,6,7,8,9,10,11,12,13,14,15,16,17,18,19): note = RNA
  misc_feature order(20,21): note = DNA
  misc_feature 1..21: note = Synthetic oligonucleotide
  source 1..21: mol_type = other RNA
gacttccagcgtttcctgttt

SEQ ID NO: 869 - RNA, 21 nt, synthetic construct
  modified_base 20..21: mod_base = OTHER; note = thymine
  misc_feature order(1,2,3,4,5,6,7,8,9,10,11,12,13,14,15,16,17,18,19): note = RNA
  misc_feature order(20,21): note = DNA
  misc_feature 1..21: note = Synthetic oligonucleotide
  source 1..21: mol_type = other RNA
acgacttccagcgtttccttt

SEQ ID NO: 870 - RNA, 21 nt, synthetic construct
  modified_base 20..21: mod_base = OTHER; note = thymine
  misc_feature order(1,2,3,4,5,6,7,8,9,10,11,12,13,14,15,16,17,18,19): note = RNA
  misc_feature order(20,21): note = DNA
  misc_feature 1..21: note = Synthetic oligonucleotide
  source 1..21: mol_type = other RNA
aacgacttccagcgtttcctt

SEQ ID NO: 871 - RNA, 21 nt, synthetic construct
  modified_base 20..21: mod_base = OTHER; note = thymine
  misc_feature order(1,2,3,4,5,6,7,8,9,10,11,12,13,14,15,16,17,18,19): note = RNA
  misc_feature order(20,21): note = DNA
  misc_feature 1..21: note = Synthetic oligonucleotide
  source 1..21: mol_type = other RNA
aaacgacttccagcgtttctt

SEQ ID NO: 872 - RNA, 21 nt, synthetic construct
  modified_base 20..21: mod_base = OTHER; note = thymine
  misc_feature order(1,2,3,4,5,6,7,8,9,10,11,12,13,14,15,16,17,18,19): note = RNA
  misc_feature order(20,21): note = DNA
  misc_feature 1..21: note = Synthetic oligonucleotide
  source 1..21: mol_type = other RNA
caaacgacttccagcgttttt

SEQ ID NO: 873 - RNA, 21 nt, synthetic construct
  modified_base 20..21: mod_base = OTHER; note = thymine
  misc_feature order(1,2,3,4,5,6,7,8,9,10,11,12,13,14,15,16,17,18,19): note = RNA
  misc_feature order(20,21): note = DNA
  misc_feature 1..21: note = Synthetic oligonucleotide
  source 1..21: mol_type = other RNA
ccaaacgacttccagcgtttt

SEQ ID NO: 874 - RNA, 21 nt, synthetic construct
  modified_base 20..21: mod_base = OTHER; note = thymine
  misc_feature order(1,2,3,4,5,6,7,8,9,10,11,12,13,14,15,16,17,18,19): note = RNA
  misc_feature order(20,21): note = DNA
  misc_feature 1..21: note = Synthetic oligonucleotide
  source 1..21: mol_type = other RNA
agccaaacgacttccagcgtt

SEQ ID NO: 875 - RNA, 21 nt, synthetic construct
  modified_base 20..21: mod_base = OTHER; note = thymine
  misc_feature order(1,2,3,4,5,6,7,8,9,10,11,12,13,14,15,16,17,18,19): note = RNA
  misc_feature order(20,21): note = DNA
  misc_feature 1..21: note = Synthetic oligonucleotide
  source 1..21: mol_type = other RNA
aagccaaacgacttccagctt

SEQ ID NO: 876 - RNA, 21 nt, synthetic construct
  modified_base 20..21: mod_base = OTHER; note = thymine
  misc_feature order(1,2,3,4,5,6,7,8,9,10,11,12,13,14,15,16,17,18,19): note = RNA
  misc_feature order(20,21): note = DNA
  misc_feature 1..21: note = Synthetic oligonucleotide
  source 1..21: mol_type = other RNA
acaagccaaacgacttccatt

SEQ ID NO: 877 - RNA, 21 nt, synthetic construct
  modified_base 20..21: mod_base = OTHER; note = thymine
  misc_feature order(1,2,3,4,5,6,7,8,9,10,11,12,13,14,15,16,17,18,19): note = RNA
  misc_feature order(20,21): note = DNA
  misc_feature 1..21: note = Synthetic oligonucleotide
  source 1..21: mol_type = other RNA
cacaagccaaacgacttcctt

SEQ ID NO: 878 - RNA, 21 nt, synthetic construct
  modified_base 20..21: mod_base = OTHER; note = thymine
  misc_feature order(1,2,3,4,5,6,7,8,9,10,11,12,13,14,15,16,17,18,19): note = RNA
  misc_feature order(20,21): note = DNA
  misc_feature 1..21: note = Synthetic oligonucleotide
  source 1..21: mol_type = other RNA
ccacaagccaaacgacttctt

SEQ ID NO: 879 - RNA, 21 nt, synthetic construct
  modified_base 20..21: mod_base = OTHER; note = thymine
  misc_feature order(1,2,3,4,5,6,7,8,9,10,11,12,13,14,15,16,17,18,19): note = RNA
  misc_feature order(20,21): note = DNA
  misc_feature 1..21: note = Synthetic oligonucleotide
  source 1..21: mol_type = other RNA
accacaagccaaacgactttt

SEQ ID NO: 880 - RNA, 21 nt, synthetic construct
  modified_base 20..21: mod_base = OTHER; note = thymine
  misc_feature order(1,2,3,4,5,6,7,8,9,10,11,12,13,14,15,16,17,18,19): note = RNA
  misc_feature order(20,21): note = DNA
  misc_feature 1..21: note = Synthetic oligonucleotide
  source 1..21: mol_type = other RNA
tacaccacaagccaaacgatt

SEQ ID NO: 881 - RNA, 21 nt, synthetic construct
  modified_base 20..21: mod_base = OTHER; note = thymine
  misc_feature order(1,2,3,4,5,6,7,8,9,10,11,12,13,14,15,16,17,18,19): note = RNA
  misc_feature order(20,21): note = DNA
  misc_feature 1..21: note = Synthetic oligonucleotide
  source 1..21: mol_type = other RNA
ttacaccacaagccaaacgtt

SEQ ID NO: 882 - RNA, 21 nt, synthetic construct
  modified_base 20..21: mod_base = OTHER; note = thymine
  misc_feature order(1,2,3,4,5,6,7,8,9,10,11,12,13,14,15,16,17,18,19): note = RNA
  misc_feature order(20,21): note = DNA
  misc_feature 1..21: note = Synthetic oligonucleotide
  source 1..21: mol_type = other RNA
attacaccacaagccaaactt

SEQ ID NO: 883 - RNA, 21 nt, synthetic construct
  modified_base 20..21: mod_base = OTHER; note = thymine
  misc_feature order(1,2,3,4,5,6,7,8,9,10,11,12,13,14,15,16,17,18,19): note = RNA
  misc_feature order(20,21): note = DNA
  misc_feature 1..21: note = Synthetic oligonucleotide
  source 1..21: mol_type = other RNA
aattacaccacaagccaaatt

SEQ ID NO: 884 - RNA, 21 nt, synthetic construct
  modified_base 20..21: mod_base = OTHER; note = thymine
  misc_feature order(1,2,3,4,5,6,7,8,9,10,11,12,13,14,15,16,17,18,19): note = RNA
  misc_feature order(20,21): note = DNA
  misc_feature 1..21: note = Synthetic oligonucleotide
  source 1..21: mol_type = other RNA
caattacaccacaagccaatt

SEQ ID NO: 885 - RNA, 21 nt, synthetic construct
  modified_base 20..21: mod_base = OTHER; note = thymine
  misc_feature order(1,2,3,4,5,6,7,8,9,10,11,12,13,14,15,16,17,18,19): note = RNA
  misc_feature order(20,21): note = DNA
  misc_feature 1..21: note = Synthetic oligonucleotide
  source 1..21: mol_type = other RNA
ccaattacaccacaagccatt

SEQ ID NO: 886 - RNA, 21 nt, synthetic construct
  modified_base 20..21: mod_base = OTHER; note = thymine
  misc_feature order(1,2,3,4,5,6,7,8,9,10,11,12,13,14,15,16,17,18,19): note = RNA
  misc_feature order(20,21): note = DNA
  misc_feature 1..21: note = Synthetic oligonucleotide
  source 1..21: mol_type = other RNA
cccaattacaccacaagcctt

SEQ ID NO: 887 - RNA, 21 nt, synthetic construct
  modified_base 20..21: mod_base = OTHER; note = thymine
  misc_feature order(1,2,3,4,5,6,7,8,9,10,11,12,13,14,15,16,17,18,19): note = RNA
  misc_feature order(20,21): note = DNA
  misc_feature 1..21: note = Synthetic oligonucleotide
  source 1..21: mol_type = other RNA
tcccaattacaccacaagctt

SEQ ID NO: 888 - RNA, 21 nt, synthetic construct
  modified_base 20..21: mod_base = OTHER; note = thymine
  misc_feature order(1,2,3,4,5,6,7,8,9,10,11,12,13,14,15,16,17,18,19): note = RNA
  misc_feature order(20,21): note = DNA
  misc_feature 1..21: note = Synthetic oligonucleotide
  source 1..21: mol_type = other RNA
atcccaattacaccacaagtt

SEQ ID NO: 889 - RNA, 21 nt, synthetic construct
  modified_base 20..21: mod_base = OTHER; note = thymine
  misc_feature order(1,2,3,4,5,6,7,8,9,10,11,12,13,14,15,16,17,18,19): note = RNA
  misc_feature order(20,21): note = DNA
  misc_feature 1..21: note = Synthetic oligonucleotide
  source 1..21: mol_type = other RNA
tgggcgatcccaattacactt

SEQ ID NO: 890 - RNA, 21 nt, synthetic construct
  modified_base 20..21: mod_base = OTHER; note = thymine
  misc_feature order(1,2,3,4,5,6,7,8,9,10,11,12,13,14,15,16,17,18,19): note = RNA
  misc_feature order(20,21): note = DNA
  misc_feature 1..21: note = Synthetic oligonucleotide
  source 1..21: mol_type = other RNA
ttgggcgatcccaattacatt

SEQ ID NO: 891 - RNA, 21 nt, synthetic construct
  modified_base 20..21: mod_base = OTHER; note = thymine
  misc_feature order(1,2,3,4,5,6,7,8,9,10,11,12,13,14,15,16,17,18,19): note = RNA
  misc_feature order(20,21): note = DNA
  misc_feature 1..21: note = Synthetic oligonucleotide
  source 1..21: mol_type = other RNA
attgggcgatcccaattactt

SEQ ID NO: 892 - RNA, 21 nt, synthetic construct
  modified_base 20..21: mod_base = OTHER; note = thymine
  misc_feature order(1,2,3,4,5,6,7,8,9,10,11,12,13,14,15,16,17,18,19): note = RNA
  misc_feature order(20,21): note = DNA
  misc_feature 1..21: note = Synthetic oligonucleotide
  source 1..21: mol_type = other RNA
tattgggcgatcccaattatt

SEQ ID NO: 893 - RNA, 21 nt, synthetic construct
  modified_base 20..21: mod_base = OTHER; note = thymine
  misc_feature order(1,2,3,4,5,6,7,8,9,10,11,12,13,14,15,16,17,18,19): note = RNA
  misc_feature order(20,21): note = DNA
  misc_feature 1..21: note = Synthetic oligonucleotide
  source 1..21: mol_type = other RNA
ttattgggcgatcccaatttt

SEQ ID NO: 894 - DNA, 25 bp, synthetic construct
  misc_feature 1..25: note = Synthetic primer
  source 1..25: mol_type = other DNA
gtaggtggaaattctagcatcatcc

SEQ ID NO: 895 - DNA, 465 bp, Homo sapiens
  source 1..465: mol_type = other DNA
atggcgacgaaggccgtgtgcgtgctgaagggcgacggcccagtgcagggcatcatcaatttcgagcagaaggaaagtaatggaccagtgaaggtgtggggaagcattaaaggactgactgaaggcctgcatggattccatgttcatgagtttggagataatacagcaggctgtaccagtgcaggtcctcactttaatcctctatccagaaaacacggtgggccaaaggatgaagagaggcatgttggagacttgggcaatgtgactgctgacaaagatgctgtggccgatgtgtctattgaagattctgtgatctcactctcaggagaccattgcatcattggccgcacactggtggtccatgaaaaagcagatgacttgggcaaaggtggaaatgaagaaagtacaaagacaggaaacgctggaagtcgtttggcttgtggtgtaattgggatcgcccaataa

SEQ ID NO: 896 - DNA, 20 bp, synthetic construct
  misc_feature 1..20: note = Synthetic primer
  source 1..20: mol_type = other DNA
gcacggcatcctctatgtgt

SEQ ID NO: 897 - DNA, 20 bp, synthetic construct
  misc_feature 1..20: note = Synthetic primer
  source 1..20: mol_type = other DNA
aatgttcacgcagtgggcta

SEQ ID NO: 898 - DNA, 21 bp, synthetic construct
  misc_feature 1..21: note = Synthetic primer
  source 1..21: mol_type = other DNA
cgagagagaatgtcccaggtc

SEQ ID NO: 899 - DNA, 20 bp, synthetic construct
  misc_feature 1..20: note = Synthetic primer
  source 1..20: mol_type = other DNA
tctcattggctgcttcctgt

SEQ ID NO: 900 - DNA, 24 bp, synthetic construct
  misc_feature 1..24: note = Synthetic primer
  source 1..24: mol_type = other DNA
aagcattaaaggactgactgaagg

SEQ ID NO: 901 - DNA, 21 bp, synthetic construct
  misc_feature 1..21: note = Synthetic primer
  source 1..21: mol_type = other DNA
caagtctccaacatgcctctc

SEQ ID NO: 902 - DNA, 22 bp, synthetic construct
  misc_feature 1..22: note = Synthetic primer
  source 1..22: mol_type = other DNA
ggacaatacacaaggctgtacc

SEQ ID NO: 903 - DNA, 20 bp, synthetic construct
  misc_feature 1..20: note = Synthetic primer
  source 1..20: mol_type = other DNA
cgtcctttccagcagtcaca

SEQ ID NO: 904 - DNA, 25 bp, synthetic construct
  misc_feature 1..25: note = Synthetic primer
  source 1..25: mol_type = other DNA
tcatactggctattatatgggtttt

SEQ ID NO: 905 - DNA, 21 bp, synthetic construct
  misc_feature 1..21: note = Synthetic primer
  source 1..21: mol_type = other DNA
tgctctatgccagcatttctc

SEQ ID NO: 906 - DNA, 26 bp, synthetic construct
  misc_feature 1..26: note = Synthetic primer
  source 1..26: mol_type = other DNA
gctattatatggaaatgctggcatag

SEQ ID NO: 907 - DNA, 24 bp, synthetic construct
  misc_feature 1..24: note = Synthetic primer
  source 1..24: mol_type = other DNA
ttccagatctgtctgatcgtttct

SEQ ID NO: 908 - DNA, 22 bp, synthetic construct
  misc_feature 1..22: note = Synthetic primer
  source 1..22: mol_type = other DNA
tgctcacccaccaacaatttag

SEQ ID NO: 909 - DNA, 22 bp, synthetic construct
  misc_feature 1..22: note = Synthetic primer
  source 1..22: mol_type = other DNA
tctgctctgactttagcacctg

SEQ ID NO: 910 - DNA, 20 bp, synthetic construct
  misc_feature 1..20: note = Synthetic primer
  source 1..20: mol_type = other DNA
gctctggaattgtaccgcag

SEQ ID NO: 911 - DNA, 20 bp, synthetic construct
  misc_feature 1..20: note = Synthetic primer
  source 1..20: mol_type = other DNA
ctgcagcaaatcgcttggga

SEQ ID NO: 912 - RNA, 20 nt, synthetic construct
  misc_feature 1..20: note = Synthetic oligonucleotide
  source 1..20: mol_type = other RNA
tcgagcagaaggaaagtaat

SEQ ID NO: 913 - RNA, 22 nt, synthetic construct
  misc_feature 1..22: note = Synthetic oligonucleotide
  source 1..22: mol_type = other RNA
attactttccttctgctcgaaa

SEQ ID NO: 914 - RNA, 20 nt, synthetic construct
  misc_feature 1..20: note = Synthetic oligonucleotide
  source 1..20: mol_type = other RNA
cagggcatcatcaatttcga

SEQ ID NO: 915 - RNA, 22 nt, synthetic construct
  misc_feature 1..22: note = Synthetic oligonucleotide
  source 1..22: mol_type = other RNA
tcgaaattgatgatgccctgca

SEQ ID NO: 916 - RNA, 20 nt, synthetic construct
  misc_feature 1..20: note = Synthetic oligonucleotide
  source 1..20: mol_type = other RNA
agcattaaaggactgactga

SEQ ID NO: 917 - RNA, 22 nt, synthetic construct
  misc_feature 1..22: note = Synthetic oligonucleotide
  source 1..22: mol_type = other RNA
tcagtcagtcctttaatgcttc

SEQ ID NO: 918 - RNA, 20 nt, synthetic construct
  misc_feature 1..20: note = Synthetic oligonucleotide
  source 1..20: mol_type = other RNA
gcgacgaaggccgtgtgcgt

SEQ ID NO: 919 - RNA, 22 nt, synthetic construct
  misc_feature 1..22: note = Synthetic oligonucleotide
  source 1..22: mol_type = other RNA
acgcacacggccttcgtcgcca

SEQ ID NO: 920 - RNA, 20 nt, synthetic construct
  misc_feature 1..20: note = Synthetic oligonucleotide
  source 1..20: mol_type = other RNA
gcaatgtgactgctgacaaa

SEQ ID NO: 921 - RNA, 22 nt, synthetic construct
  misc_feature 1..22: note = Synthetic oligonucleotide
  source 1..22: mol_type = other RNA
tttgtcagcagtcacattgccc

SEQ ID NO: 922 - RNA, 20 nt, synthetic construct
  misc_feature 1..20: note = Synthetic oligonucleotide
  modified_base order(1,2,3,18,19,20): mod_base = OTHER; note = phosphorothioate (PS) backbone modification
  modified_base order(2,4,6,8,9,10,11,12,14,16,18,20): mod_base = OTHER; note = 2'-fluoro
  modified_base order(1,3,5,7,13,15,17,19): mod_base = OTHER; note = 2'-O-methyl
  source 1..20: mol_type = other RNA
tcgagcagaaggaaagtaat

SEQ ID NO: 923 - RNA, 22 nt, synthetic construct
  misc_feature 1..22: note = Synthetic oligonucleotide
  modified_base order(1,2,3,20,21,22): mod_base = OTHER; note = phosphorothioate (PS) backbone modification
  modified_base order(2,4,6,8,10,12,14,16,18,20,22): mod_base = OTHER; note = 2'-fluoro
  modified_base order(1,3,5,7,9,11,13,15,17,19,21): mod_base = OTHER; note = 2'-O-methyl
  modified_base 1: mod_base = OTHER; note = 5'-phosophate
  source 1..22: mol_type = other RNA
attactttccttctgctcgaaa

SEQ ID NO: 924 - RNA, 20 nt, synthetic construct
  misc_feature 1..20: note = Synthetic oligonucleotide
  modified_base order(1,2,3,18,19,20): mod_base = OTHER; note = phosphorothioate (PS) backbone modification
  modified_base order(2,4,6,8,9,10,11,12,14,16,18,20): mod_base = OTHER; note = 2'-fluoro
  modified_base order(1,3,5,7,13,15,17,19): mod_base = OTHER; note = 2'-O-methyl
  source 1..20: mol_type = other RNA
cagggcatcatcaatttcga

SEQ ID NO: 925 - RNA, 22 nt, synthetic construct
  misc_feature 1..22: note = Synthetic oligonucleotide
  modified_base order(1,2,3,20,21,22): mod_base = OTHER; note = phosphorothioate (PS) backbone modification
  modified_base order(2,4,6,8,10,12,14,16,18,20,22): mod_base = OTHER; note = 2'-fluoro
  modified_base order(1,3,5,7,9,11,13,15,17,19,21): mod_base = OTHER; note = 2'-O-methyl
  modified_base 1: mod_base = OTHER; note = 5'-phosophate
  source 1..22: mol_type = other RNA
tcgaaattgttgatgccctgca

SEQ ID NO: 926 - RNA, 20 nt, synthetic construct
  misc_feature 1..20: note = Synthetic oligonucleotide
  modified_base order(1,2,3,18,19,20): mod_base = OTHER; note = phosphorothioate (PS) backbone modification
  modified_base order(2,4,6,8,9,10,11,12,14,16,18,20): mod_base = OTHER; note = 2'-fluoro
  modified_base order(1,3,5,7,13,15,17,19): mod_base = OTHER; note = 2'-O-methyl
  source 1..20: mol_type = other RNA
agcattaaaggactgactga

SEQ ID NO: 927 - RNA, 22 nt, synthetic construct
  misc_feature 1..22: note = Synthetic oligonucleotide
  modified_base order(1,2,3,20,21,22): mod_base = OTHER; note = phosphorothioate (PS) backbone modification
  modified_base order(2,4,6,8,10,12,14,16,18,20,22): mod_base = OTHER; note = 2'-fluoro
  modified_base order(1,3,5,7,9,11,13,15,17,19,21): mod_base = OTHER; note = 2'-O-methyl
  modified_base 1: mod_base = OTHER; note = 5'-phosophate
  source 1..22: mol_type = other RNA
tcagtcagtcctttaatgcttc

SEQ ID NO: 928 - RNA, 20 nt, synthetic construct
  misc_feature 1..20: note = Synthetic oligonucleotide
  modified_base order(1,2,3,18,19,20): mod_base = OTHER; note = phosphorothioate (PS) backbone modification
  modified_base order(2,4,6,8,9,10,11,12,14,16,18,20): mod_base = OTHER; note = 2'-fluoro
  modified_base order(1,3,5,7,13,15,17,19): mod_base = OTHER; note = 2'-O-methyl
  source 1..20: mol_type = other RNA
gcgacgaaggccgtgtgcgt

SEQ ID NO: 929 - RNA, 22 nt, synthetic construct
  misc_feature 1..22: note = Synthetic oligonucleotide
  modified_base order(1,2,3,20,21,22): mod_base = OTHER; note = phosphorothioate (PS) backbone modification
  modified_base order(2,4,6,8,10,12,14,16,18,20,22): mod_base = OTHER; note = 2'-fluoro
  modified_base order(1,3,5,7,9,11,13,15,17,19,21): mod_base = OTHER; note = 2'-O-methyl
  modified_base 1: mod_base = OTHER; note = 5'-phosophate
  source 1..22: mol_type = other RNA
acgcacacggccttcgtcgcca

SEQ ID NO: 930 - RNA, 20 nt, synthetic construct
  misc_feature 1..20: note = Synthetic oligonucleotide
  modified_base order(1,2,3,18,19,20): mod_base = OTHER; note = phosphorothioate (PS) backbone modification
  modified_base order(2,4,6,8,9,10,11,12,14,16,18,20): mod_base = OTHER; note = 2'-fluoro
  modified_base order(1,3,5,7,13,15,17,19): mod_base = OTHER; note = 2'-O-methyl
  source 1..20: mol_type = other RNA
gcaatgtgactgctgacaaa

SEQ ID NO: 931 - RNA, 22 nt, synthetic construct
  misc_feature 1..22: note = Synthetic oligonucleotide
  modified_base order(1,2,3,20,21,22): mod_base = OTHER; note = phosphorothioate (PS) backbone modification
  modified_base order(2,4,6,8,10,12,14,16,18,20,22): mod_base = OTHER; note = 2'-fluoro
  modified_base order(1,3,5,7,9,11,13,15,17,19,21): mod_base = OTHER; note = 2'-O-methyl
  modified_base 1: mod_base = OTHER; note = 5'-phosophate
  source 1..22: mol_type = other RNA
tttgtcagcagtcacattgccc

SEQ ID NO: 932 - RNA, 34 nt, synthetic construct
  misc_feature 1..34: note = Synthetic oligonucleotide
  modified_base order(1,2,3,18,19,20,21,22,23,24,25,26,27,28,29,30,31,32,33,34): mod_base = OTHER; note = phosphorothioate (PS) backbone modification
  modified_base order(2,4,6,8,9,10,11,12,14,16,18,20): mod_base = OTHER; note = 2'-fluoro
  modified_base order(1,3,5,7,13,15,17,19): mod_base = OTHER; note = 2'-O-methyl
  modified_base order(21,22,23,24,25,26,27,28,29,30,31,32,33,34): mod_base = OTHER; note = 2'-O-methoxyethyl (2 MOE)
  modified_base 28: mod_base = OTHER; note = 5-methyl cytosine
  modified_base order(21,22,24,26,27,29,31,33,34): mod_base = OTHER; note = 5-methyl uracil
  modified_base 20: mod_base = OTHER; note = Spacer-9 linker (2-(2-(2-(bis(4-methoxyphenyl)(phenyl)methoxy)ethoxy)ethoxy )ethyl (2-cyanoethyl) diisopropylphosphoramidite)
  source 1..34: mol_type = other RNA
tcgagcagaaggaaagtaatttgtattctatgtt

SEQ ID NO: 933 - RNA, 22 nt, synthetic construct
  misc_feature 1..22: note = Synthetic oligonucleotide
  modified_base order(1,2,3,20,21,22): mod_base = OTHER; note = phosphorothioate (PS) backbone modification
  modified_base order(2,4,6,8,10,12,14,16,18,20,22): mod_base = OTHER; note = 2'-fluoro
  modified_base order(1,3,5,7,9,11,13,15,17,19,21): mod_base = OTHER; note = 2'-O-methyl
  source 1..22: mol_type = other RNA
attactttccttctgctcgaaa

SEQ ID NO: 934 - RNA, 34 nt, synthetic construct
  misc_feature 1..34: note = Synthetic oligonucleotide
  modified_base order(1,2,3,18,19,20,21,22,23,24,25,26,27,28,29,30,31,32,33,34): mod_base = OTHER; note = phosphorothioate (PS) backbone modification
  modified_base order(2,4,6,8,9,10,11,12,14,16,18,20): mod_base = OTHER; note = 2'-fluoro
  modified_base order(1,3,5,7,13,15,17,19): mod_base = OTHER; note = 2'-O-methyl
  modified_base order(21,22,23,24,25,26,27,28,29,30,31,32,33,34): mod_base = OTHER; note = 2'-O-methoxyethyl (2 MOE)
  modified_base 28: mod_base = OTHER; note = 5-methyl cytosine
  modified_base order(21,22,24,26,27,29,31,33,34): mod_base = OTHER; note = 5-methyl uracil
  modified_base 20: mod_base = OTHER; note = Spacer-9 linker (2-(2-(2-(bis(4-methoxyphenyl)(phenyl)methoxy)ethoxy)ethoxy )ethyl (2-cyanoethyl) diisopropylphosphoramidite)
  source 1..34: mol_type = other RNA
cagggcatcatcaatttcgattgtattctatgtt

SEQ ID NO: 935 - RNA, 22 nt, synthetic construct
  misc_feature 1..22: note = Synthetic oligonucleotide
  modified_base order(1,2,3,20,21,22): mod_base = OTHER; note = phosphorothioate (PS) backbone modification
  modified_base order(2,4,6,8,10,12,14,16,18,20,22): mod_base = OTHER; note = 2'-fluoro
  modified_base order(1,3,5,7,9,11,13,15,17,19,21): mod_base = OTHER; note = 2'-O-methyl
  source 1..22: mol_type = other RNA
tcgaaattgttgatgccctgca

SEQ ID NO: 936 - RNA, 34 nt, synthetic construct
  misc_feature 1..34: note = Synthetic oligonucleotide
  modified_base order(1,2,3,18,19,20,21,22,23,24,25,26,27,28,29,30,31,32,33,34): mod_base = OTHER; note = phosphorothioate (PS) backbone modification
  modified_base order(2,4,6,8,9,10,11,12,14,16,18,20): mod_base = OTHER; note = 2'-fluoro
  modified_base order(1,3,5,7,13,15,17,19): mod_base = OTHER; note = 2'-O-methyl
  modified_base order(21,22,23,24,25,26,27,28,29,30,31,32,33,34): mod_base = OTHER; note = 2'-O-methoxyethyl (2 MOE)
  modified_base 28: mod_base = OTHER; note = 5-methyl cytosine
  modified_base order(21,22,24,26,27,29,31,33,34): mod_base = OTHER; note = 5-methyl uracil
  modified_base 20: mod_base = OTHER; note = Spacer-9 linker (2-(2-(2-(bis(4-methoxyphenyl)(phenyl)methoxy)ethoxy)ethoxy )ethyl (2-cyanoethyl) diisopropylphosphoramidite)
  source 1..34: mol_type = other RNA
agcattaaaggactgactgattgtattctatgtt

SEQ ID NO: 937 - RNA, 22 nt, synthetic construct
  misc_feature 1..22: note = Synthetic oligonucleotide
  modified_base order(1,2,3,20,21,22): mod_base = OTHER; note = phosphorothioate (PS) backbone modification
  modified_base order(2,4,6,8,10,12,14,16,18,20,22): mod_base = OTHER; note = 2'-fluoro
  modified_base order(1,3,5,7,9,11,13,15,17,19,21): mod_base = OTHER; note = 2'-O-methyl
  source 1..22: mol_type = other RNA
tcagtcagtcctttaatgcttc

SEQ ID NO: 938 - RNA, 34 nt, synthetic construct
  misc_feature 1..34: note = Synthetic oligonucleotide
  modified_base order(1,2,3,18,19,20,21,22,23,24,25,26,27,28,29,30,31,32,33,34): mod_base = OTHER; note = phosphorothioate (PS) backbone modification
  modified_base order(2,4,6,8,9,10,11,12,14,16,18,20): mod_base = OTHER; note = 2'-fluoro
  modified_base order(1,3,5,7,13,15,17,19): mod_base = OTHER; note = 2'-O-methyl
  modified_base order(21,22,23,24,25,26,27,28,29,30,31,32,33,34): mod_base = OTHER; note = 2'-O-methoxyethyl (2 MOE)
  modified_base 28: mod_base = OTHER; note = 5-methyl cytosine
  modified_base order(21,22,24,26,27,29,31,33,34): mod_base = OTHER; note = 5-methyl uracil
  modified_base 20: mod_base = OTHER; note = Spacer-9 linker (2-(2-(2-(bis(4-methoxyphenyl)(phenyl)methoxy)ethoxy)ethoxy )ethyl (2-cyanoethyl) diisopropylphosphoramidite)
  source 1..34: mol_type = other RNA
gcgacgaaggccgtgtgcgtttgtattctatgtt

SEQ ID NO: 939 - RNA, 22 nt, synthetic construct
  misc_feature 1..22: note = Synthetic oligonucleotide
  modified_base order(1,2,3,20,21,22): mod_base = OTHER; note = phosphorothioate (PS) backbone modification
  modified_base order(2,4,6,8,10,12,14,16,18,20,22): mod_base = OTHER; note = 2'-fluoro
  modified_base order(1,3,5,7,9,11,13,15,17,19,21): mod_base = OTHER; note = 2'-O-methyl
  source 1..22: mol_type = other RNA
acgcacacggccttcgtcgcca

SEQ ID NO: 940 - RNA, 34 nt, synthetic construct
  misc_feature 1..34: note = Synthetic oligonucleotide
  modified_base order(1,2,3,18,19,20,21,22,23,24,25,26,27,28,29,30,31,32,33,34): mod_base = OTHER; note = phosphorothioate (PS) backbone modification
  modified_base order(2,4,6,8,9,10,11,12,14,16,18,20): mod_base = OTHER; note = 2'-fluoro
  modified_base order(1,3,5,7,13,15,17,19): mod_base = OTHER; note = 2'-O-methyl
  modified_base order(21,22,23,24,25,26,27,28,29,30,31,32,33,34): mod_base = OTHER; note = 2'-O-methoxyethyl (2 MOE)
  modified_base 28: mod_base = OTHER; note = 5-methyl cytosine
  modified_base order(21,22,24,26,27,29,31,33,34): mod_base = OTHER; note = 5-methyl uracil
  modified_base 20: mod_base = OTHER; note = Spacer-9 linker (2-(2-(2-(bis(4-methoxyphenyl)(phenyl)methoxy)ethoxy)ethoxy )ethyl (2-cyanoethyl) diisopropylphosphoramidite)
  source 1..34: mol_type = other RNA
gcaatgtgactgctgacaaattgtattctatgtt

SEQ ID NO: 941 - RNA, 22 nt, synthetic construct
  misc_feature 1..22: note = Synthetic oligonucleotide
  modified_base order(1,2,3,20,21,22): mod_base = OTHER; note = phosphorothioate (PS) backbone modification
  modified_base order(2,4,6,8,10,12,14,16,18,20,22): mod_base = OTHER; note = 2'-fluoro
  modified_base order(1,3,5,7,9,11,13,15,17,19,21): mod_base = OTHER; note = 2'-O-methyl
  source 1..22: mol_type = other RNA
tttgtcagcagtcacattgccc

SEQ ID NO: 942 - RNA, 33 nt, synthetic construct
  misc_feature 1..33: note = Synthetic oligonucleotide
  modified_base order(1,2,3,16,17,18,19,20,21,22,23,24,25,26,27,28,29,30,31,32,33): mod_base = OTHER; note = phosphorothioate (PS) backbone modification
  modified_base order(1,3,5,7,9,10,11,13,15,17,19): mod_base = OTHER; note = 2'-fluoro
  modified_base order(2,4,6,8,12,14,16,18): mod_base = OTHER; note = 2'-O-methyl
  modified_base order(20,21,22,23,24,25,26,27,28,29,30,31,32,33): mod_base = OTHER; note = 2'-O-methoxyethyl (2 MOE)
  modified_base 27: mod_base = OTHER; note = 5-methyl cytosine
  modified_base order(20,21,23,25,26,28,30,32,33): mod_base = OTHER; note = 5-methyl uracil
  modified_base 19: mod_base = OTHER; note = Spacer-9 linker (2-(2-(2-(bis(4-methoxyphenyl)(phenyl)methoxy)ethoxy)ethoxy )ethyl (2-cyanoethyl) diisopropylphosphoramidite)
  source 1..33: mol_type = other RNA
ggtggaaatgaagaaagtattgtattctatgtt

SEQ ID NO: 943 - RNA, 22 nt, synthetic construct
  misc_feature 1..22: note = Synthetic oligonucleotide
  modified_base order(1,2,3,20,21,22): mod_base = OTHER; note = phosphorothioate (PS) backbone modification
  modified_base order(2,4,6,8,10,12,14,16,18,20,22): mod_base = OTHER; note = 2'-fluoro
  modified_base order(1,3,5,7,9,11,13,15,17,19,21): mod_base = OTHER; note = 2'-O-methyl
  modified_base 1: mod_base = OTHER; note = 5'-(E)-vinylphosphonate
  source 1..22: mol_type = other RNA
tcgaaattgttgatgccctgca

SEQ ID NO: 944 - RNA, 22 nt, synthetic construct
  misc_feature 1..22: note = Synthetic oligonucleotide
  modified_base order(1,2,3,20,21,22): mod_base = OTHER; note = phosphorothioate (PS) backbone modification
  modified_base order(2,4,6,8,10,12,14,16,18,20,22): mod_base = OTHER; note = 2'-fluoro
  modified_base order(1,3,5,7,9,11,13,15,17,19,21): mod_base = OTHER; note = 2'-O-methyl
  modified_base 1: mod_base = OTHER; note = 5'-(E)-vinylphosphonate
  source 1..22: mol_type = other RNA
tcagtcagtcctttaatgcttc

SEQ ID NO: 945 - RNA, 19 nt, synthetic construct
  misc_feature 1..19: note = Synthetic oligonucleotide
  source 1..19: mol_type = other RNA
tgcagggcatcatcaattt

SEQ ID NO: 946 - RNA, 19 nt, synthetic construct
  misc_feature 1..19: note = Synthetic oligonucleotide
  source 1..19: mol_type = other RNA
aaattgatgatgccctgca

SEQ ID NO: 947 - RNA, 33 nt, synthetic construct
  misc_feature 1..33: note = Synthetic oligonucleotide
  modified_base order(1,2,3,17,18,19,20,21,22,23,24,25,26,27,28,29,30,31,32,33): mod_base = OTHER; note = phosphorothioate (PS) backbone modification
  modified_base order(1,3,5,7,9,10,11,13,15,17,19): mod_base = OTHER; note = 2'-fluoro
  modified_base order(2,4,6,8,12,14,16,18): mod_base = OTHER; note = 2'-O-methyl
  modified_base order(20,21,22,23,24,25,26,27,28,29,30,31,32,33): mod_base = OTHER; note = 2'-O-methoxyethyl (2 MOE)
  modified_base order(20,21,23,25,26,28,30,32,33): mod_base = OTHER; note = 5-methyl uracil
  modified_base 19: mod_base = OTHER; note = Spacer-9 linker (2-(2-(2-(bis(4-methoxyphenyl)(phenyl)methoxy)ethoxy)ethoxy )ethyl (2-cyanoethyl) diisopropylphosphoramidite)
  source 1..33: mol_type = other RNA
tacttttgtgtagtacaaattgtattctatgtt

SEQ ID NO: 948 - RNA, 19 nt, synthetic construct
  misc_feature 1..19: note = Synthetic oligonucleotide
  source 1..19: mol_type = other RNA
ggtggaaatgaagaaagta

SEQ ID NO: 949 - RNA, 21 nt, synthetic construct
  misc_feature 1..21: note = Synthetic oligonucleotide
  source 1..21: mol_type = other RNA
tactttcttcatttccacctt

SEQ ID NO: 950 - RNA, 22 nt, synthetic construct
  misc_feature 1..22: note = Synthetic oligonucleotide
  modified_base order(1,2,3,20,21,22): mod_base = OTHER; note = phosphorothioate (PS) backbone modification
  modified_base order(2,4,6,8,10,12,14,16,18,20,22): mod_base = OTHER; note = 2'-fluoro
  modified_base order(1,3,5,7,9,11,13,15,17,19,21): mod_base = OTHER; note = 2'-O-methyl
  modified_base 1: mod_base = OTHER; note = 5'-(E)-vinylphosphonate
  source 1..22: mol_type = other RNA
acgcacacggccttcgtcgcca

SEQ ID NO: 951 - RNA, 22 nt, synthetic construct
  misc_feature 1..22: note = Synthetic oligonucleotide
  modified_base order(1,2,3,20,21,22): mod_base = OTHER; note = phosphorothioate (PS) backbone modification
  modified_base order(2,4,6,8,10,12,14,16,18,20,22): mod_base = OTHER; note = 2'-fluoro
  modified_base order(1,3,5,7,9,11,13,15,17,19,21): mod_base = OTHER; note = 2'-O-methyl
  modified_base 1: mod_base = OTHER; note = 5'-(E)-vinylphosphonate
  source 1..22: mol_type = other RNA
tttgtcagcagtcacattgccc

SEQ ID NO: 952 - RNA, 40 nt, synthetic construct
  modified_base 26: mod_base = OTHER; note = thymine
  modified_base 30..32: mod_base = OTHER; note = thymine
  modified_base 34: mod_base = OTHER; note = thymine
  modified_base 40: mod_base = OTHER; note = thymine
  misc_feature 1..40: note = Synthetic oligonucleotide
  modified_base order(1,2,3,18,19,20,21,22,23,24,25,26,27,28,29,30,31,32,33,34,35,36,37,38,39,40): mod_base = OTHER; note = phosphorothioate (PS) backbone modification
  modified_base order(2,4,6,8,9,10,11,12,14,16,18,20): mod_base = OTHER; note = 2'-fluoro
  modified_base order(1,3,5,7,13,15,17,19): mod_base = OTHER; note = 2'-O-methyl
  modified_base order(21,22,23,24,25,36,37,38,39,40): mod_base = OTHER; note = 2'-O-methoxyethyl (2 MOE)
  modified_base order(21,36,39): mod_base = OTHER; note = 5-methyl cytosine
  modified_base order(28,33): mod_base = OTHER; note = 5-methyl cytosine
  modified_base 20: mod_base = OTHER; note = Spacer-9 linker (2-(2-(2-(bis(4-methoxyphenyl)(phenyl)methoxy)ethoxy)ethoxy )ethyl (2-cyanoethyl) diisopropylphosphoramidite)
  source 1..40: mol_type = other RNA
gcgacgaaggccgtgtgcgtcaggatacatttctacagct

SEQ ID NO: 953 - RNA, 14 nt, synthetic construct
  misc_feature 1..14: note = Synthetic oligonucleotide
  source 1..14: mol_type = other RNA
ttgtattctatgtt

SEQ ID NO: 954 - RNA, 14 nt, synthetic construct
  misc_feature 1..14: note = Synthetic oligonucleotide
  modified_base order(1,2,3,4,5,6,7,8,9,10,11,12,13,14): mod_base = OTHER; note = phosphorothioate (PS) backbone modification
  modified_base order(1,2,3,4,5,6,7,8,9,10,11,12,13,14): mod_base = OTHER; note = 2'-O-methoxyethyl (2 MOE)
  modified_base order(1,2,4,6,7,9,11,13,14): mod_base = OTHER; note = 5-methyl uracil
  modified_base 1: mod_base = OTHER; note = Spacer-9 linker (2-(2-(2-(bis(4-methoxyphenyl)(phenyl)methoxy)ethoxy)ethoxy )ethyl (2-cyanoethyl) diisopropylphosphoramidite)
  source 1..14: mol_type = other RNA
ttgtattctatgtt

SEQ ID NO: 955 - RNA, 34 nt, synthetic construct
  misc_feature 1..34: note = Synthetic oligonucleotide
  modified_base order(1,2,3,18,19,20,21,22,23,24,25,26,27,28,29,30,31,32,33,34): mod_base = OTHER; note = phosphorothioate (PS) backbone modification
  modified_base order(1,3,5,7,9,10,11,12,13,15,17,19): mod_base = OTHER; note = 2'-fluoro
  modified_base order(2,4,6,8,14,16,18,20): mod_base = OTHER; note = 2'-O-methyl
  modified_base order(21,22,23,24,25,26,27,28,29,30,31,32,33,34): mod_base = OTHER; note = 2'-O-methoxyethyl (2 MOE)
  modified_base 28: mod_base = OTHER; note = 5-methyl cytosine
  modified_base order(21,22,24,26,27,29,31,33,34): mod_base = OTHER; note = 5-methyl uracil
  modified_base 20: mod_base = OTHER; note = Spacer-9 linker (2-(2-(2-(bis(4-methoxyphenyl)(phenyl)methoxy)ethoxy)ethoxy )ethyl (2-cyanoethyl) diisopropylphosphoramidite)
  source 1..34: mol_type = other RNA
cggtggaggcctggcgcaatttgtattctatgtt

SEQ ID NO: 956 - RNA, 22 nt, synthetic construct
  misc_feature 1..22: note = Synthetic oligonucleotide
  modified_base order(1,2,3,20,21,22): mod_base = OTHER; note = phosphorothioate (PS) backbone modification
  modified_base order(2,4,6,8,10,12,14,16,18,20,22): mod_base = OTHER; note = 2'-fluoro
  modified_base order(1,3,5,7,9,11,13,15,17,19,21): mod_base = OTHER; note = 2'-O-methyl
  source 1..22: mol_type = other RNA
gccacctccggaccgcgttaca

SEQ ID NO: 957 - RNA, 34 nt, synthetic construct
  misc_feature 1..34: note = Synthetic oligonucleotide
  modified_base order(1,2,3,18,19,20,21,22,23,24,25,26,27,28,29,30,31,32,33,34): mod_base = OTHER; note = phosphorothioate (PS) backbone modification
  modified_base order(2,4,6,8,10,11,12,14,16,18,20): mod_base = OTHER; note = 2'-fluoro
  modified_base order(1,3,5,7,9,13,15,17,19): mod_base = OTHER; note = 2'-O-methyl
  modified_base order(21,22,23,24,25,26,27,28,29,30,31,32,33,34): mod_base = OTHER; note = 2'-O-methoxyethyl (2 MOE)
  modified_base 28: mod_base = OTHER; note = 5-methyl cytosine
  modified_base order(21,22,24,26,27,29,31,33,34): mod_base = OTHER; note = 5-methyl uracil
  modified_base 20: mod_base = OTHER; note = Spacer-9 linker (2-(2-(2-(bis(4-methoxyphenyl)(phenyl)methoxy)ethoxy)ethoxy )ethyl (2-cyanoethyl) diisopropylphosphoramidite)
  source 1..34: mol_type = other RNA
gactactgagtgacagtagattgtattctatgtt

SEQ ID NO: 958 - RNA, 22 nt, synthetic construct
  misc_feature 1..22: note = Synthetic oligonucleotide
  modified_base order(1,2,3,20,21,22): mod_base = OTHER; note = phosphorothioate (PS) backbone modification
  modified_base order(2,4,6,8,10,12,14,16,18,20,22): mod_base = OTHER; note = 2'-fluoro
  modified_base order(1,3,5,7,9,11,13,15,17,19,21): mod_base = OTHER; note = 2'-O-methyl
  source 1..22: mol_type = other RNA
tctactgtcactcagtagtcgt

SEQ ID NO: 959 - RNA, 19 nt, synthetic construct
  misc_feature 1..19: note = Synthetic oligonucleotide
  source 1..19: mol_type = other RNA
atggcgacgaaggccgtgt

SEQ ID NO: 960 - RNA, 19 nt, synthetic construct
  misc_feature 1..19: note = Synthetic oligonucleotide
  source 1..19: mol_type = other RNA
acacggccttcgtcgccat

SEQ ID NO: 961 - RNA, 21 nt, synthetic construct
  modified_base 20..21: mod_base = OTHER; note = thymine
  misc_feature 1..21: note = Synthetic oligonucleotide
  source 1..21: mol_type = other RNA
atggcgacgaaggccgtgctt

SEQ ID NO: 962 - RNA, 21 nt, synthetic construct
  modified_base 20..21: mod_base = OTHER; note = thymine
  misc_feature 1..21: note = Synthetic oligonucleotide
  source 1..21: mol_type = other RNA
tcacggccttcgtcgccattt

SEQ ID NO: 963 - RNA, 19 nt, synthetic construct
  misc_feature 1..19: note = Synthetic oligonucleotide
  source 1..19: mol_type = other RNA
cgacgaaggccgtgtgcgt

SEQ ID NO: 964 - RNA, 19 nt, synthetic construct
  misc_feature 1..19: note = Synthetic oligonucleotide
  source 1..19: mol_type = other RNA
acgcacacggccttcgtcg

SEQ ID NO: 965 - RNA, 21 nt, synthetic construct
  modified_base 20..21: mod_base = OTHER; note = thymine
  misc_feature 1..21: note = Synthetic oligonucleotide
  source 1..21: mol_type = other RNA
cgacgaaggccgtgtgcgctt

SEQ ID NO: 966 - RNA, 21 nt, synthetic construct
  modified_base 20..21: mod_base = OTHER; note = thymine
  misc_feature 1..21: note = Synthetic oligonucleotide
  source 1..21: mol_type = other RNA
tcgcacacggccttcgtcgtt

SEQ ID NO: 967 - RNA, 23 nt, synthetic construct
  misc_feature 1..23: note = Synthetic oligonucleotide
  source 1..23: mol_type = other RNA
gtggccgatgtgtctattgaaga

SEQ ID NO: 968 - RNA, 23 nt, synthetic construct
  misc_feature 1..23: note = Synthetic oligonucleotide
  source 1..23: mol_type = other RNA
tcttcaatagacacatcggccac

SEQ ID NO: 969 - RNA, 23 nt, synthetic construct
  misc_feature 1..23: note = Synthetic oligonucleotide
  source 1..23: mol_type = other RNA
gtggggaagcattaaaggactga

SEQ ID NO: 970 - RNA, 23 nt, synthetic construct
  misc_feature 1..23: note = Synthetic oligonucleotide
  source 1..23: mol_type = other RNA
tcagtcctttaatgcttccccac

SEQ ID NO: 971 - RNA, 19 nt, synthetic construct
  misc_feature 1..19: note = Synthetic oligonucleotide
  source 1..19: mol_type = other RNA
agggcatcatcaatttcga

SEQ ID NO: 972 - RNA, 19 nt, synthetic construct
  misc_feature 1..19: note = Synthetic oligonucleotide
  source 1..19: mol_type = other RNA
tcgaaattgatgatgccct

SEQ ID NO: 973 - RNA, 21 nt, synthetic construct
  modified_base 20..21: mod_base = OTHER; note = thymine
  misc_feature 1..21: note = Synthetic oligonucleotide
  source 1..21: mol_type = other RNA
agggcatcatcaatttcgctt

SEQ ID NO: 974 - RNA, 21 nt, synthetic construct
  modified_base 20..21: mod_base = OTHER; note = thymine
  misc_feature 1..21: note = Synthetic oligonucleotide
  source 1..21: mol_type = other RNA
tcgaaattgatgatgcccttt

SEQ ID NO: 975 - RNA, 20 nt, synthetic construct
  modified_base 6: mod_base = OTHER; note = thymine
  modified_base 10..12: mod_base = OTHER; note = thymine
  modified_base 14: mod_base = OTHER; note = thymine
  modified_base 20: mod_base = OTHER; note = thymine
  misc_feature 1..20: note = Synthetic oligonucleotide
  modified_base order(1,2,3,4,5,6,7,8,9,10,11,12,13,14,15,16,17,18,19,20): mod_base = OTHER; note = phosphorothioate (PS) backbone modification
  modified_base order(1,2,3,4,5,16,17,18,19,20): mod_base = OTHER; note = 2'-O-methoxyethyl (2 MOE)
  modified_base order(1,16,19): mod_base = OTHER; note = 5-methyl cytosine
  modified_base order(8,13): mod_base = OTHER; note = 5-methyl cytosine
  source 1..20: mol_type = other RNA
caggatacatttctacagct

SEQ ID NO: 976 - RNA, 19 nt, synthetic construct
  misc_feature 1..19: note = Synthetic oligonucleotide
  source 1..19: mol_type = other RNA
tcccttggatgtagtctga

SEQ ID NO: 977 - RNA, 19 nt, synthetic construct
  misc_feature 1..19: note = Synthetic oligonucleotide
  source 1..19: mol_type = other RNA
ccttggatgtagtctgagg

SEQ ID NO: 978 - RNA, 19 nt, synthetic construct
  misc_feature 1..19: note = Synthetic oligonucleotide
  source 1..19: mol_type = other RNA
ggatgtagtctgaggcccc

SEQ ID NO: 979 - RNA, 19 nt, synthetic construct
  misc_feature 1..19: note = Synthetic oligonucleotide
  source 1..19: mol_type = other RNA
gatgtagtctgaggcccct

SEQ ID NO: 980 - RNA, 19 nt, synthetic construct
  misc_feature 1..19: note = Synthetic oligonucleotide
  source 1..19: mol_type = other RNA
tgtagtctgaggcccctta

SEQ ID NO: 981 - RNA, 19 nt, synthetic construct
  misc_feature 1..19: note = Synthetic oligonucleotide
  source 1..19: mol_type = other RNA
gtagtctgaggccccttaa

SEQ ID NO: 982 - RNA, 19 nt, synthetic construct
  misc_feature 1..19: note = Synthetic oligonucleotide
  source 1..19: mol_type = other RNA
tctgaggccccttaactca

SEQ ID NO: 983 - RNA, 19 nt, synthetic construct
  misc_feature 1..19: note = Synthetic oligonucleotide
  source 1..19: mol_type = other RNA
ctgaggccccttaactcat

SEQ ID NO: 984 - RNA, 19 nt, synthetic construct
  misc_feature 1..19: note = Synthetic oligonucleotide
  source 1..19: mol_type = other RNA
gaggccccttaactcatct

SEQ ID NO: 985 - RNA, 19 nt, synthetic construct
  misc_feature 1..19: note = Synthetic oligonucleotide
  source 1..19: mol_type = other RNA
ggccccttaactcatctgt

SEQ ID NO: 986 - RNA, 19 nt, synthetic construct
  misc_feature 1..19: note = Synthetic oligonucleotide
  source 1..19: mol_type = other RNA
gccccttaactcatctgtt

SEQ ID NO: 987 - RNA, 19 nt, synthetic construct
  misc_feature 1..19: note = Synthetic oligonucleotide
  source 1..19: mol_type = other RNA
ccccttaactcatctgtta

SEQ ID NO: 988 - RNA, 19 nt, synthetic construct
  misc_feature 1..19: note = Synthetic oligonucleotide
  source 1..19: mol_type = other RNA
cccttaactcatctgttat

SEQ ID NO: 989 - RNA, 19 nt, synthetic construct
  misc_feature 1..19: note = Synthetic oligonucleotide
  source 1..19: mol_type = other RNA
ccttaactcatctgttatc

SEQ ID NO: 990 - RNA, 19 nt, synthetic construct
  misc_feature 1..19: note = Synthetic oligonucleotide
  source 1..19: mol_type = other RNA
taactcatctgttatcctg

SEQ ID NO: 991 - RNA, 19 nt, synthetic construct
  misc_feature 1..19: note = Synthetic oligonucleotide
  source 1..19: mol_type = other RNA
actcatctgttatcctgct

SEQ ID NO: 992 - RNA, 19 nt, synthetic construct
  misc_feature 1..19: note = Synthetic oligonucleotide
  source 1..19: mol_type = other RNA
ctcatctgttatcctgcta

SEQ ID NO: 993 - RNA, 19 nt, synthetic construct
  misc_feature 1..19: note = Synthetic oligonucleotide
  source 1..19: mol_type = other RNA
catctgttatcctgctagc

SEQ ID NO: 994 - RNA, 19 nt, synthetic construct
  misc_feature 1..19: note = Synthetic oligonucleotide
  source 1..19: mol_type = other RNA
atctgttatcctgctagct

SEQ ID NO: 995 - RNA, 19 nt, synthetic construct
  misc_feature 1..19: note = Synthetic oligonucleotide
  source 1..19: mol_type = other RNA
tctgttatcctgctagctg

SEQ ID NO: 996 - RNA, 19 nt, synthetic construct
  misc_feature 1..19: note = Synthetic oligonucleotide
  source 1..19: mol_type = other RNA
ctgttatcctgctagctgt

SEQ ID NO: 997 - RNA, 19 nt, synthetic construct
  misc_feature 1..19: note = Synthetic oligonucleotide
  source 1..19: mol_type = other RNA
tgttatcctgctagctgta

SEQ ID NO: 998 - RNA, 19 nt, synthetic construct
  misc_feature 1..19: note = Synthetic oligonucleotide
  source 1..19: mol_type = other RNA
gttatcctgctagctgtag

SEQ ID NO: 999 - RNA, 19 nt, synthetic construct
  misc_feature 1..19: note = Synthetic oligonucleotide
  source 1..19: mol_type = other RNA
ttatcctgctagctgtaga

SEQ ID NO: 1000 - RNA, 19 nt, synthetic construct
  misc_feature 1..19: note = Synthetic oligonucleotide
  source 1..19: mol_type = other RNA
tatcctgctagctgtagaa

SEQ ID NO: 1001 - RNA, 19 nt, synthetic construct
  misc_feature 1..19: note = Synthetic oligonucleotide
  source 1..19: mol_type = other RNA
tcctgctagctgtagaaat

SEQ ID NO: 1002 - RNA, 19 nt, synthetic construct
  misc_feature 1..19: note = Synthetic oligonucleotide
  source 1..19: mol_type = other RNA
cctgctagctgtagaaatg

SEQ ID NO: 1003 - RNA, 19 nt, synthetic construct
  misc_feature 1..19: note = Synthetic oligonucleotide
  source 1..19: mol_type = other RNA
ctgctagctgtagaaatgt

SEQ ID NO: 1004 - RNA, 19 nt, synthetic construct
  misc_feature 1..19: note = Synthetic oligonucleotide
  source 1..19: mol_type = other RNA
tgctagctgtagaaatgta

SEQ ID NO: 1005 - RNA, 19 nt, synthetic construct
  misc_feature 1..19: note = Synthetic oligonucleotide
  source 1..19: mol_type = other RNA
gctagctgtagaaatgtat

SEQ ID NO: 1006 - RNA, 19 nt, synthetic construct
  misc_feature 1..19: note = Synthetic oligonucleotide
  source 1..19: mol_type = other RNA
ctagctgtagaaatgtatc

SEQ ID NO: 1007 - RNA, 19 nt, synthetic construct
  misc_feature 1..19: note = Synthetic oligonucleotide
  source 1..19: mol_type = other RNA
agctgtagaaatgtatcct

SEQ ID NO: 1008 - RNA, 19 nt, synthetic construct
  misc_feature 1..19: note = Synthetic oligonucleotide
  source 1..19: mol_type = other RNA
gctgtagaaatgtatcctg

SEQ ID NO: 1009 - RNA, 19 nt, synthetic construct
  misc_feature 1..19: note = Synthetic oligonucleotide
  source 1..19: mol_type = other RNA
ctgtagaaatgtatcctga

SEQ ID NO: 1010 - RNA, 19 nt, synthetic construct
  misc_feature 1..19: note = Synthetic oligonucleotide
  source 1..19: mol_type = other RNA
cagagttgctttaaagtac

SEQ ID NO: 1011 - RNA, 19 nt, synthetic construct
  misc_feature 1..19: note = Synthetic oligonucleotide
  source 1..19: mol_type = other RNA
agagttgctttaaagtacc

SEQ ID NO: 1012 - RNA, 19 nt, synthetic construct
  misc_feature 1..19: note = Synthetic oligonucleotide
  source 1..19: mol_type = other RNA
agttgctttaaagtacctg

SEQ ID NO: 1013 - RNA, 19 nt, synthetic construct
  misc_feature 1..19: note = Synthetic oligonucleotide
  source 1..19: mol_type = other RNA
tgctttaaagtacctgtag

SEQ ID NO: 1014 - RNA, 19 nt, synthetic construct
  misc_feature 1..19: note = Synthetic oligonucleotide
  source 1..19: mol_type = other RNA
gctttaaagtacctgtagt

SEQ ID NO: 1015 - RNA, 19 nt, synthetic construct
  misc_feature 1..19: note = Synthetic oligonucleotide
  source 1..19: mol_type = other RNA
ctttaaagtacctgtagtg

SEQ ID NO: 1016 - RNA, 19 nt, synthetic construct
  misc_feature 1..19: note = Synthetic oligonucleotide
  source 1..19: mol_type = other RNA
ttaaagtacctgtagtgag

SEQ ID NO: 1017 - RNA, 19 nt, synthetic construct
  misc_feature 1..19: note = Synthetic oligonucleotide
  source 1..19: mol_type = other RNA
gtacctgtagtgagaaact

SEQ ID NO: 1018 - RNA, 19 nt, synthetic construct
  misc_feature 1..19: note = Synthetic oligonucleotide
  source 1..19: mol_type = other RNA
acctgtagtgagaaactga

SEQ ID NO: 1019 - RNA, 19 nt, synthetic construct
  misc_feature 1..19: note = Synthetic oligonucleotide
  source 1..19: mol_type = other RNA
cctgtagtgagaaactgat

SEQ ID NO: 1020 - RNA, 19 nt, synthetic construct
  misc_feature 1..19: note = Synthetic oligonucleotide
  source 1..19: mol_type = other RNA
ctgtagtgagaaactgatt

SEQ ID NO: 1021 - RNA, 19 nt, synthetic construct
  misc_feature 1..19: note = Synthetic oligonucleotide
  source 1..19: mol_type = other RNA
ctgatttatgatcacttgg

SEQ ID NO: 1022 - RNA, 21 nt, synthetic construct
  misc_feature 1..21: note = Synthetic oligonucleotide
  source 1..21: mol_type = other RNA
tcagactacatccaagggaat

SEQ ID NO: 1023 - RNA, 21 nt, synthetic construct
  misc_feature 1..21: note = Synthetic oligonucleotide
  source 1..21: mol_type = other RNA
cctcagactacatccaaggga

SEQ ID NO: 1024 - RNA, 21 nt, synthetic construct
  misc_feature 1..21: note = Synthetic oligonucleotide
  source 1..21: mol_type = other RNA
ggggcctcagactacatccaa

SEQ ID NO: 1025 - RNA, 21 nt, synthetic construct
  misc_feature 1..21: note = Synthetic oligonucleotide
  source 1..21: mol_type = other RNA
aggggcctcagactacatcca

SEQ ID NO: 1026 - RNA, 21 nt, synthetic construct
  misc_feature 1..21: note = Synthetic oligonucleotide
  source 1..21: mol_type = other RNA
taaggggcctcagactacatc

SEQ ID NO: 1027 - RNA, 21 nt, synthetic construct
  misc_feature 1..21: note = Synthetic oligonucleotide
  source 1..21: mol_type = other RNA
ttaaggggcctcagactacat

SEQ ID NO: 1028 - RNA, 21 nt, synthetic construct
  misc_feature 1..21: note = Synthetic oligonucleotide
  source 1..21: mol_type = other RNA
tgagttaaggggcctcagact

SEQ ID NO: 1029 - RNA, 21 nt, synthetic construct
  misc_feature 1..21: note = Synthetic oligonucleotide
  source 1..21: mol_type = other RNA
atgagttaaggggcctcagac

SEQ ID NO: 1030 - RNA, 21 nt, synthetic construct
  misc_feature 1..21: note = Synthetic oligonucleotide
  source 1..21: mol_type = other RNA
agatgagttaaggggcctcag

SEQ ID NO: 1031 - RNA, 21 nt, synthetic construct
  misc_feature 1..21: note = Synthetic oligonucleotide
  source 1..21: mol_type = other RNA
acagatgagttaaggggcctc

SEQ ID NO: 1032 - RNA, 21 nt, synthetic construct
  misc_feature 1..21: note = Synthetic oligonucleotide
  source 1..21: mol_type = other RNA
aacagatgagttaaggggcct

SEQ ID NO: 1033 - RNA, 21 nt, synthetic construct
  misc_feature 1..21: note = Synthetic oligonucleotide
  source 1..21: mol_type = other RNA
taacagatgagttaaggggcc

SEQ ID NO: 1034 - RNA, 21 nt, synthetic construct
  misc_feature 1..21: note = Synthetic oligonucleotide
  source 1..21: mol_type = other RNA
ataacagatgagttaaggggc

SEQ ID NO: 1035 - RNA, 21 nt, synthetic construct
  misc_feature 1..21: note = Synthetic oligonucleotide
  source 1..21: mol_type = other RNA
gataacagatgagttaagggg

SEQ ID NO: 1036 - RNA, 21 nt, synthetic construct
  misc_feature 1..21: note = Synthetic oligonucleotide
  source 1..21: mol_type = other RNA
caggataacagatgagttaag

SEQ ID NO: 1037 - RNA, 21 nt, synthetic construct
  misc_feature 1..21: note = Synthetic oligonucleotide
  source 1..21: mol_type = other RNA
agcaggataacagatgagtta

SEQ ID NO: 1038 - RNA, 21 nt, synthetic construct
  misc_feature 1..21: note = Synthetic oligonucleotide
  source 1..21: mol_type = other RNA
tagcaggataacagatgagtt

SEQ ID NO: 1039 - RNA, 21 nt, synthetic construct
  misc_feature 1..21: note = Synthetic oligonucleotide
  source 1..21: mol_type = other RNA
gctagcaggataacagatgag

SEQ ID NO: 1040 - RNA, 21 nt, synthetic construct
  misc_feature 1..21: note = Synthetic oligonucleotide
  source 1..21: mol_type = other RNA
agctagcaggataacagatga

SEQ ID NO: 1041 - RNA, 21 nt, synthetic construct
  misc_feature 1..21: note = Synthetic oligonucleotide
  source 1..21: mol_type = other RNA
cagctagcaggataacagatg

SEQ ID NO: 1042 - RNA, 21 nt, synthetic construct
  misc_feature 1..21: note = Synthetic oligonucleotide
  source 1..21: mol_type = other RNA
acagctagcaggataacagat

SEQ ID NO: 1043 - RNA, 21 nt, synthetic construct
  misc_feature 1..21: note = Synthetic oligonucleotide
  source 1..21: mol_type = other RNA
tacagctagcaggataacaga

SEQ ID NO: 1044 - RNA, 21 nt, synthetic construct
  misc_feature 1..21: note = Synthetic oligonucleotide
  source 1..21: mol_type = other RNA
ctacagctagcaggataacag

SEQ ID NO: 1045 - RNA, 21 nt, synthetic construct
  misc_feature 1..21: note = Synthetic oligonucleotide
  source 1..21: mol_type = other RNA
tctacagctagcaggataaca

SEQ ID NO: 1046 - RNA, 21 nt, synthetic construct
  misc_feature 1..21: note = Synthetic oligonucleotide
  source 1..21: mol_type = other RNA
ttctacagctagcaggataac

SEQ ID NO: 1047 - RNA, 21 nt, synthetic construct
  misc_feature 1..21: note = Synthetic oligonucleotide
  source 1..21: mol_type = other RNA
atttctacagctagcaggata

SEQ ID NO: 1048 - RNA, 21 nt, synthetic construct
  misc_feature 1..21: note = Synthetic oligonucleotide
  source 1..21: mol_type = other RNA
catttctacagctagcaggat

SEQ ID NO: 1049 - RNA, 21 nt, synthetic construct
  misc_feature 1..21: note = Synthetic oligonucleotide
  source 1..21: mol_type = other RNA
acatttctacagctagcagga

SEQ ID NO: 1050 - RNA, 21 nt, synthetic construct
  misc_feature 1..21: note = Synthetic oligonucleotide
  source 1..21: mol_type = other RNA
tacatttctacagctagcagg

SEQ ID NO: 1051 - RNA, 21 nt, synthetic construct
  misc_feature 1..21: note = Synthetic oligonucleotide
  source 1..21: mol_type = other RNA
atacatttctacagctagcag

SEQ ID NO: 1052 - RNA, 21 nt, synthetic construct
  misc_feature 1..21: note = Synthetic oligonucleotide
  source 1..21: mol_type = other RNA
gatacatttctacagctagca

SEQ ID NO: 1053 - RNA, 21 nt, synthetic construct
  misc_feature 1..21: note = Synthetic oligonucleotide
  source 1..21: mol_type = other RNA
aggatacatttctacagctag

SEQ ID NO: 1054 - RNA, 21 nt, synthetic construct
  misc_feature 1..21: note = Synthetic oligonucleotide
  source 1..21: mol_type = other RNA
caggatacatttctacagcta

SEQ ID NO: 1055 - RNA, 21 nt, synthetic construct
  misc_feature 1..21: note = Synthetic oligonucleotide
  source 1..21: mol_type = other RNA
tcaggatacatttctacagct

SEQ ID NO: 1056 - RNA, 21 nt, synthetic construct
  misc_feature 1..21: note = Synthetic oligonucleotide
  source 1..21: mol_type = other RNA
gtactttaaagcaactctgaa

SEQ ID NO: 1057 - RNA, 21 nt, synthetic construct
  misc_feature 1..21: note = Synthetic oligonucleotide
  source 1..21: mol_type = other RNA
ggtactttaaagcaactctga

SEQ ID NO: 1058 - RNA, 21 nt, synthetic construct
  misc_feature 1..21: note = Synthetic oligonucleotide
  source 1..21: mol_type = other RNA
caggtactttaaagcaactct

SEQ ID NO: 1059 - RNA, 21 nt, synthetic construct
  misc_feature 1..21: note = Synthetic oligonucleotide
  source 1..21: mol_type = other RNA
ctacaggtactttaaagcaac

SEQ ID NO: 1060 - RNA, 21 nt, synthetic construct
  misc_feature 1..21: note = Synthetic oligonucleotide
  source 1..21: mol_type = other RNA
actacaggtactttaaagcaa

SEQ ID NO: 1061 - RNA, 21 nt, synthetic construct
  misc_feature 1..21: note = Synthetic oligonucleotide
  source 1..21: mol_type = other RNA
cactacaggtactttaaagca

SEQ ID NO: 1062 - RNA, 21 nt, synthetic construct
  misc_feature 1..21: note = Synthetic oligonucleotide
  source 1..21: mol_type = other RNA
ctcactacaggtactttaaag

SEQ ID NO: 1063 - RNA, 21 nt, synthetic construct
  misc_feature 1..21: note = Synthetic oligonucleotide
  source 1..21: mol_type = other RNA
agtttctcactacaggtactt

SEQ ID NO: 1064 - RNA, 21 nt, synthetic construct
  misc_feature 1..21: note = Synthetic oligonucleotide
  source 1..21: mol_type = other RNA
tcagtttctcactacaggtac

SEQ ID NO: 1065 - RNA, 21 nt, synthetic construct
  misc_feature 1..21: note = Synthetic oligonucleotide
  source 1..21: mol_type = other RNA
atcagtttctcactacaggta

SEQ ID NO: 1066 - RNA, 21 nt, synthetic construct
  misc_feature 1..21: note = Synthetic oligonucleotide
  source 1..21: mol_type = other RNA
aatcagtttctcactacaggt

SEQ ID NO: 1067 - RNA, 21 nt, synthetic construct
  misc_feature 1..21: note = Synthetic oligonucleotide
  source 1..21: mol_type = other RNA
ccaagtgatcataaatcagtt

SEQ ID NO: 1068 - DNA, 21 bp, synthetic construct
  misc_feature 1..21: note = Synthetic oligonucleotide
  source 1..21: mol_type = other DNA
tcagactacatccaagggaat

SEQ ID NO: 1069 - DNA, 21 bp, synthetic construct
  misc_feature 1..21: note = Synthetic oligonucleotide
  source 1..21: mol_type = other DNA
cctcagactacatccaaggga

SEQ ID NO: 1070 - DNA, 21 bp, synthetic construct
  misc_feature 1..21: note = Synthetic oligonucleotide
  source 1..21: mol_type = other DNA
ggggcctcagactacatccaa

SEQ ID NO: 1071 - DNA, 21 bp, synthetic construct
  misc_feature 1..21: note = Synthetic oligonucleotide
  source 1..21: mol_type = other DNA
aggggcctcagactacatcca

SEQ ID NO: 1072 - DNA, 21 bp, synthetic construct
  misc_feature 1..21: note = Synthetic oligonucleotide
  source 1..21: mol_type = other DNA
taaggggcctcagactacatc

SEQ ID NO: 1073 - DNA, 21 bp, synthetic construct
  misc_feature 1..21: note = Synthetic oligonucleotide
  source 1..21: mol_type = other DNA
ttaaggggcctcagactacat

SEQ ID NO: 1074 - DNA, 21 bp, synthetic construct
  misc_feature 1..21: note = Synthetic oligonucleotide
  source 1..21: mol_type = other DNA
tgagttaaggggcctcagact

SEQ ID NO: 1075 - DNA, 21 bp, synthetic construct
  misc_feature 1..21: note = Synthetic oligonucleotide
  source 1..21: mol_type = other DNA
atgagttaaggggcctcagac

SEQ ID NO: 1076 - DNA, 21 bp, synthetic construct
  misc_feature 1..21: note = Synthetic oligonucleotide
  source 1..21: mol_type = other DNA
agatgagttaaggggcctcag

SEQ ID NO: 1077 - DNA, 21 bp, synthetic construct
  misc_feature 1..21: note = Synthetic oligonucleotide
  source 1..21: mol_type = other DNA
acagatgagttaaggggcctc

SEQ ID NO: 1078 - DNA, 21 bp, synthetic construct
  misc_feature 1..21: note = Synthetic oligonucleotide
  source 1..21: mol_type = other DNA
aacagatgagttaaggggcct

SEQ ID NO: 1079 - DNA, 21 bp, synthetic construct
  misc_feature 1..21: note = Synthetic oligonucleotide
  source 1..21: mol_type = other DNA
taacagatgagttaaggggcc

SEQ ID NO: 1080 - DNA, 21 bp, synthetic construct
  misc_feature 1..21: note = Synthetic oligonucleotide
  source 1..21: mol_type = other DNA
ataacagatgagttaaggggc

SEQ ID NO: 1081 - DNA, 21 bp, synthetic construct
  misc_feature 1..21: note = Synthetic oligonucleotide
  source 1..21: mol_type = other DNA
gataacagatgagttaagggg

SEQ ID NO: 1082 - DNA, 21 bp, synthetic construct
  misc_feature 1..21: note = Synthetic oligonucleotide
  source 1..21: mol_type = other DNA
caggataacagatgagttaag

SEQ ID NO: 1083 - DNA, 21 bp, synthetic construct
  misc_feature 1..21: note = Synthetic oligonucleotide
  source 1..21: mol_type = other DNA
agcaggataacagatgagtta

SEQ ID NO: 1084 - DNA, 21 bp, synthetic construct
  misc_feature 1..21: note = Synthetic oligonucleotide
  source 1..21: mol_type = other DNA
tagcaggataacagatgagtt

SEQ ID NO: 1085 - DNA, 21 bp, synthetic construct
  misc_feature 1..21: note = Synthetic oligonucleotide
  source 1..21: mol_type = other DNA
gctagcaggataacagatgag

SEQ ID NO: 1086 - DNA, 21 bp, synthetic construct
  misc_feature 1..21: note = Synthetic oligonucleotide
  source 1..21: mol_type = other DNA
agctagcaggataacagatga

SEQ ID NO: 1087 - DNA, 21 bp, synthetic construct
  misc_feature 1..21: note = Synthetic oligonucleotide
  source 1..21: mol_type = other DNA
cagctagcaggataacagatg

SEQ ID NO: 1088 - DNA, 21 bp, synthetic construct
  misc_feature 1..21: note = Synthetic oligonucleotide
  source 1..21: mol_type = other DNA
acagctagcaggataacagat

SEQ ID NO: 1089 - DNA, 21 bp, synthetic construct
  misc_feature 1..21: note = Synthetic oligonucleotide
  source 1..21: mol_type = other DNA
tacagctagcaggataacaga

SEQ ID NO: 1090 - DNA, 21 bp, synthetic construct
  misc_feature 1..21: note = Synthetic oligonucleotide
  source 1..21: mol_type = other DNA
ctacagctagcaggataacag

SEQ ID NO: 1091 - DNA, 21 bp, synthetic construct
  misc_feature 1..21: note = Synthetic oligonucleotide
  source 1..21: mol_type = other DNA
tctacagctagcaggataaca

SEQ ID NO: 1092 - DNA, 21 bp, synthetic construct
  misc_feature 1..21: note = Synthetic oligonucleotide
  source 1..21: mol_type = other DNA
ttctacagctagcaggataac

SEQ ID NO: 1093 - DNA, 21 bp, synthetic construct
  misc_feature 1..21: note = Synthetic oligonucleotide
  source 1..21: mol_type = other DNA
atttctacagctagcaggata

SEQ ID NO: 1094 - DNA, 21 bp, synthetic construct
  misc_feature 1..21: note = Synthetic oligonucleotide
  source 1..21: mol_type = other DNA
catttctacagctagcaggat

SEQ ID NO: 1095 - DNA, 21 bp, synthetic construct
  misc_feature 1..21: note = Synthetic oligonucleotide
  source 1..21: mol_type = other DNA
acatttctacagctagcagga

SEQ ID NO: 1096 - DNA, 21 bp, synthetic construct
  misc_feature 1..21: note = Synthetic oligonucleotide
  source 1..21: mol_type = other DNA
tacatttctacagctagcagg

SEQ ID NO: 1097 - DNA, 21 bp, synthetic construct
  misc_feature 1..21: note = Synthetic oligonucleotide
  source 1..21: mol_type = other DNA
atacatttctacagctagcag

SEQ ID NO: 1098 - DNA, 21 bp, synthetic construct
  misc_feature 1..21: note = Synthetic oligonucleotide
  source 1..21: mol_type = other DNA
gatacatttctacagctagca

SEQ ID NO: 1099 - DNA, 21 bp, synthetic construct
  misc_feature 1..21: note = Synthetic oligonucleotide
  source 1..21: mol_type = other DNA
aggatacatttctacagctag

SEQ ID NO: 1100 - DNA, 21 bp, synthetic construct
  misc_feature 1..21: note = Synthetic oligonucleotide
  source 1..21: mol_type = other DNA
caggatacatttctacagcta

SEQ ID NO: 1101 - DNA, 21 bp, synthetic construct
  misc_feature 1..21: note = Synthetic oligonucleotide
  source 1..21: mol_type = other DNA
tcaggatacatttctacagct

SEQ ID NO: 1102 - DNA, 21 bp, synthetic construct
  misc_feature 1..21: note = Synthetic oligonucleotide
  source 1..21: mol_type = other DNA
gtactttaaagcaactctgaa

SEQ ID NO: 1103 - DNA, 21 bp, synthetic construct
  misc_feature 1..21: note = Synthetic oligonucleotide
  source 1..21: mol_type = other DNA
ggtactttaaagcaactctga

SEQ ID NO: 1104 - DNA, 21 bp, synthetic construct
  misc_feature 1..21: note = Synthetic oligonucleotide
  source 1..21: mol_type = other DNA
caggtactttaaagcaactct

SEQ ID NO: 1105 - DNA, 21 bp, synthetic construct
  misc_feature 1..21: note = Synthetic oligonucleotide
  source 1..21: mol_type = other DNA
ctacaggtactttaaagcaac

SEQ ID NO: 1106 - DNA, 21 bp, synthetic construct
  misc_feature 1..21: note = Synthetic oligonucleotide
  source 1..21: mol_type = other DNA
actacaggtactttaaagcaa

SEQ ID NO: 1107 - DNA, 21 bp, synthetic construct
  misc_feature 1..21: note = Synthetic oligonucleotide
  source 1..21: mol_type = other DNA
cactacaggtactttaaagca

SEQ ID NO: 1108 - DNA, 21 bp, synthetic construct
  misc_feature 1..21: note = Synthetic oligonucleotide
  source 1..21: mol_type = other DNA
ctcactacaggtactttaaag

SEQ ID NO: 1109 - DNA, 21 bp, synthetic construct
  misc_feature 1..21: note = Synthetic oligonucleotide
  source 1..21: mol_type = other DNA
agtttctcactacaggtactt

SEQ ID NO: 1110 - DNA, 21 bp, synthetic construct
  misc_feature 1..21: note = Synthetic oligonucleotide
  source 1..21: mol_type = other DNA
tcagtttctcactacaggtac

SEQ ID NO: 1111 - DNA, 21 bp, synthetic construct
  misc_feature 1..21: note = Synthetic oligonucleotide
  source 1..21: mol_type = other DNA
atcagtttctcactacaggta

SEQ ID NO: 1112 - DNA, 21 bp, synthetic construct
  misc_feature 1..21: note = Synthetic oligonucleotide
  source 1..21: mol_type = other DNA
aatcagtttctcactacaggt

SEQ ID NO: 1113 - DNA, 21 bp, synthetic construct
  misc_feature 1..21: note = Synthetic oligonucleotide
  source 1..21: mol_type = other DNA
ccaagtgatcataaatcagtt

SEQ ID NO: 1114 - DNA, 18 bp, synthetic construct
  misc_feature 1..18: note = Synthetic oligonucleotide
  source 1..18: mol_type = other DNA
ctacatccaagggaatgt

SEQ ID NO: 1115 - DNA, 18 bp, synthetic construct
  misc_feature 1..18: note = Synthetic oligonucleotide
  source 1..18: mol_type = other DNA
actacatccaagggaatg

SEQ ID NO: 1116 - DNA, 18 bp, synthetic construct
  misc_feature 1..18: note = Synthetic oligonucleotide
  source 1..18: mol_type = other DNA
gactacatccaagggaat

SEQ ID NO: 1117 - DNA, 18 bp, synthetic construct
  misc_feature 1..18: note = Synthetic oligonucleotide
  source 1..18: mol_type = other DNA
agactacatccaagggaa

SEQ ID NO: 1118 - DNA, 18 bp, synthetic construct
  misc_feature 1..18: note = Synthetic oligonucleotide
  source 1..18: mol_type = other DNA
cagactacatccaaggga

SEQ ID NO: 1119 - DNA, 18 bp, synthetic construct
  misc_feature 1..18: note = Synthetic oligonucleotide
  source 1..18: mol_type = other DNA
tcagactacatccaaggg

SEQ ID NO: 1120 - DNA, 18 bp, synthetic construct
  misc_feature 1..18: note = Synthetic oligonucleotide
  source 1..18: mol_type = other DNA
ctcagactacatccaagg

SEQ ID NO: 1121 - DNA, 18 bp, synthetic construct
  misc_feature 1..18: note = Synthetic oligonucleotide
  source 1..18: mol_type = other DNA
cctcagactacatccaag

SEQ ID NO: 1122 - DNA, 18 bp, synthetic construct
  misc_feature 1..18: note = Synthetic oligonucleotide
  source 1..18: mol_type = other DNA
gcctcagactacatccaa

SEQ ID NO: 1123 - DNA, 18 bp, synthetic construct
  misc_feature 1..18: note = Synthetic oligonucleotide
  source 1..18: mol_type = other DNA
ggcctcagactacatcca

SEQ ID NO: 1124 - DNA, 18 bp, synthetic construct
  misc_feature 1..18: note = Synthetic oligonucleotide
  source 1..18: mol_type = other DNA
gggcctcagactacatcc

SEQ ID NO: 1125 - DNA, 18 bp, synthetic construct
  misc_feature 1..18: note = Synthetic oligonucleotide
  source 1..18: mol_type = other DNA
ggggcctcagactacatc

SEQ ID NO: 1126 - DNA, 18 bp, synthetic construct
  misc_feature 1..18: note = Synthetic oligonucleotide
  source 1..18: mol_type = other DNA
aggggcctcagactacat

SEQ ID NO: 1127 - DNA, 18 bp, synthetic construct
  misc_feature 1..18: note = Synthetic oligonucleotide
  source 1..18: mol_type = other DNA
aaggggcctcagactaca

SEQ ID NO: 1128 - DNA, 18 bp, synthetic construct
  misc_feature 1..18: note = Synthetic oligonucleotide
  source 1..18: mol_type = other DNA
taaggggcctcagactac

SEQ ID NO: 1129 - DNA, 18 bp, synthetic construct
  misc_feature 1..18: note = Synthetic oligonucleotide
  source 1..18: mol_type = other DNA
ttaaggggcctcagacta

SEQ ID NO: 1130 - DNA, 18 bp, synthetic construct
  misc_feature 1..18: note = Synthetic oligonucleotide
  source 1..18: mol_type = other DNA
gttaaggggcctcagact

SEQ ID NO: 1131 - DNA, 18 bp, synthetic construct
  misc_feature 1..18: note = Synthetic oligonucleotide
  source 1..18: mol_type = other DNA
agttaaggggcctcagac

SEQ ID NO: 1132 - DNA, 18 bp, synthetic construct
  misc_feature 1..18: note = Synthetic oligonucleotide
  source 1..18: mol_type = other DNA
gagttaaggggcctcaga

SEQ ID NO: 1133 - DNA, 18 bp, synthetic construct
  misc_feature 1..18: note = Synthetic oligonucleotide
  source 1..18: mol_type = other DNA
tgagttaaggggcctcag

SEQ ID NO: 1134 - DNA, 18 bp, synthetic construct
  misc_feature 1..18: note = Synthetic oligonucleotide
  source 1..18: mol_type = other DNA
atgagttaaggggcctca

SEQ ID NO: 1135 - DNA, 18 bp, synthetic construct
  misc_feature 1..18: note = Synthetic oligonucleotide
  source 1..18: mol_type = other DNA
gatgagttaaggggcctc

SEQ ID NO: 1136 - DNA, 18 bp, synthetic construct
  misc_feature 1..18: note = Synthetic oligonucleotide
  source 1..18: mol_type = other DNA
agatgagttaaggggcct

SEQ ID NO: 1137 - DNA, 18 bp, synthetic construct
  misc_feature 1..18: note = Synthetic oligonucleotide
  source 1..18: mol_type = other DNA
cagatgagttaaggggcc

SEQ ID NO: 1138 - DNA, 18 bp, synthetic construct
  misc_feature 1..18: note = Synthetic oligonucleotide
  source 1..18: mol_type = other DNA
acagatgagttaaggggc

SEQ ID NO: 1139 - DNA, 18 bp, synthetic construct
  misc_feature 1..18: note = Synthetic oligonucleotide
  source 1..18: mol_type = other DNA
aacagatgagttaagggg

SEQ ID NO: 1140 - DNA, 18 bp, synthetic construct
  misc_feature 1..18: note = Synthetic oligonucleotide
  source 1..18: mol_type = other DNA
taacagatgagttaaggg

SEQ ID NO: 1141 - DNA, 18 bp, synthetic construct
  misc_feature 1..18: note = Synthetic oligonucleotide
  source 1..18: mol_type = other DNA
ataacagatgagttaagg

SEQ ID NO: 1142 - DNA, 18 bp, synthetic construct
  misc_feature 1..18: note = Synthetic oligonucleotide
  source 1..18: mol_type = other DNA
gataacagatgagttaag

SEQ ID NO: 1143 - DNA, 18 bp, synthetic construct
  misc_feature 1..18: note = Synthetic oligonucleotide
  source 1..18: mol_type = other DNA
ggataacagatgagttaa

SEQ ID NO: 1144 - DNA, 18 bp, synthetic construct
  misc_feature 1..18: note = Synthetic oligonucleotide
  source 1..18: mol_type = other DNA
aggataacagatgagtta

SEQ ID NO: 1145 - DNA, 18 bp, synthetic construct
  misc_feature 1..18: note = Synthetic oligonucleotide
  source 1..18: mol_type = other DNA
caggataacagatgagtt

SEQ ID NO: 1146 - DNA, 18 bp, synthetic construct
  misc_feature 1..18: note = Synthetic oligonucleotide
  source 1..18: mol_type = other DNA
gcaggataacagatgagt

SEQ ID NO: 1147 - DNA, 18 bp, synthetic construct
  misc_feature 1..18: note = Synthetic oligonucleotide
  source 1..18: mol_type = other DNA
agcaggataacagatgag

SEQ ID NO: 1148 - DNA, 18 bp, synthetic construct
  misc_feature 1..18: note = Synthetic oligonucleotide
  source 1..18: mol_type = other DNA
caggatacatttctacag

SEQ ID NO: 1149 - DNA, 18 bp, synthetic construct
  misc_feature 1..18: note = Synthetic oligonucleotide
  source 1..18: mol_type = other DNA
actctgaaaaagtcacac

SEQ ID NO: 1150 - DNA, 18 bp, synthetic construct
  misc_feature 1..18: note = Synthetic oligonucleotide
  source 1..18: mol_type = other DNA
gcaactctgaaaaagtca

SEQ ID NO: 1151 - DNA, 18 bp, synthetic construct
  misc_feature 1..18: note = Synthetic oligonucleotide
  source 1..18: mol_type = other DNA
agcaactctgaaaaagtc

SEQ ID NO: 1152 - DNA, 18 bp, synthetic construct
  misc_feature 1..18: note = Synthetic oligonucleotide
  source 1..18: mol_type = other DNA
agtttctcactacaggta

SEQ ID NO: 1153 - DNA, 18 bp, synthetic construct
  misc_feature 1..18: note = Synthetic oligonucleotide
  source 1..18: mol_type = other DNA
cagtttctcactacaggt

SEQ ID NO: 1154 - DNA, 18 bp, synthetic construct
  misc_feature 1..18: note = Synthetic oligonucleotide
  source 1..18: mol_type = other DNA
atcagtttctcactacag

SEQ ID NO: 1155 - RNA, 18 nt, synthetic construct
  modified_base 6: mod_base = OTHER; note = thymine
  misc_feature 1..18: note = Synthetic oligonucleotide
  modified_base order(1,2,3,4,5,6,7,8,9,10,11,12,13,14,15,16,17,18): mod_base = OTHER; note = phosphorothioate (PS) backbone modification
  modified_base order(1,2,3,4,15,16,17,18): mod_base = OTHER; note = 2'-O-methoxyethyl (2 MOE)
  modified_base order(1,4): mod_base = OTHER; note = 5-methyl cytosine
  modified_base order(16,18): mod_base = OTHER; note = 5-methyl uracil
  modified_base order(7,8): mod_base = OTHER; note = 5-methyl cytosine
  source 1..18: mol_type = other RNA
ctacatccaagggaatgt

SEQ ID NO: 1156 - RNA, 18 nt, synthetic construct
  modified_base 7: mod_base = OTHER; note = thymine
  misc_feature 1..18: note = Synthetic oligonucleotide
  modified_base order(1,2,3,4,5,6,7,8,9,10,11,12,13,14,15,16,17,18): mod_base = OTHER; note = phosphorothioate (PS) backbone modification
  modified_base order(1,2,3,4,15,16,17,18): mod_base = OTHER; note = 2'-O-methoxyethyl (2 MOE)
  modified_base 2: mod_base = OTHER; note = 5-methyl cytosine
  modified_base order(3,17): mod_base = OTHER; note = 5-methyl uracil
  modified_base order(5,8,9): mod_base = OTHER; note = 5-methyl cytosine
  source 1..18: mol_type = other RNA
actacatccaagggaatg

SEQ ID NO: 1157 - RNA, 18 nt, synthetic construct
  modified_base 8: mod_base = OTHER; note = thymine
  misc_feature 1..18: note = Synthetic oligonucleotide
  modified_base order(1,2,3,4,5,6,7,8,9,10,11,12,13,14,15,16,17,18): mod_base = OTHER; note = phosphorothioate (PS) backbone modification
  modified_base order(1,2,3,4,15,16,17,18): mod_base = OTHER; note = 2'-O-methoxyethyl (2 MOE)
  modified_base 3: mod_base = OTHER; note = 5-methyl cytosine
  modified_base order(4,18): mod_base = OTHER; note = 5-methyl uracil
  modified_base order(6,9,10): mod_base = OTHER; note = 5-methyl cytosine
  source 1..18: mol_type = other RNA
gactacatccaagggaat

SEQ ID NO: 1158 - RNA, 18 nt, synthetic construct
  modified_base 5: mod_base = OTHER; note = thymine
  modified_base 9: mod_base = OTHER; note = thymine
  misc_feature 1..18: note = Synthetic oligonucleotide
  modified_base order(1,2,3,4,5,6,7,8,9,10,11,12,13,14,15,16,17,18): mod_base = OTHER; note = phosphorothioate (PS) backbone modification
  modified_base order(1,2,3,4,15,16,17,18): mod_base = OTHER; note = 2'-O-methoxyethyl (2 MOE)
  modified_base 4: mod_base = OTHER; note = 5-methyl cytosine
  modified_base order(7,10,11): mod_base = OTHER; note = 5-methyl cytosine
  source 1..18: mol_type = other RNA
agactacatccaagggaa

SEQ ID NO: 1159 - RNA, 18 nt, synthetic construct
  modified_base 6: mod_base = OTHER; note = thymine
  modified_base 10: mod_base = OTHER; note = thymine
  misc_feature 1..18: note = Synthetic oligonucleotide
  modified_base order(1,2,3,4,5,6,7,8,9,10,11,12,13,14,15,16,17,18): mod_base = OTHER; note = phosphorothioate (PS) backbone modification
  modified_base order(1,2,3,4,15,16,17,18): mod_base = OTHER; note = 2'-O-methoxyethyl (2 MOE)
  modified_base 1: mod_base = OTHER; note = 5-methyl cytosine
  modified_base order(5,8,11,12): mod_base = OTHER; note = 5-methyl cytosine
  source 1..18: mol_type = other RNA
cagactacatccaaggga

SEQ ID NO: 1160 - RNA, 18 nt, synthetic construct
  modified_base 7: mod_base = OTHER; note = thymine
  modified_base 11: mod_base = OTHER; note = thymine
  misc_feature 1..18: note = Synthetic oligonucleotide
  modified_base order(1,2,3,4,5,6,7,8,9,10,11,12,13,14,15,16,17,18): mod_base = OTHER; note = phosphorothioate (PS) backbone modification
  modified_base order(1,2,3,4,15,16,17,18): mod_base = OTHER; note = 2'-O-methoxyethyl (2 MOE)
  modified_base 2: mod_base = OTHER; note = 5-methyl cytosine
  modified_base order(6,9,12,13): mod_base = OTHER; note = 5-methyl cytosine
  source 1..18: mol_type = other RNA
tcagactacatccaaggg

SEQ ID NO: 1161 - RNA, 18 nt, synthetic construct
  modified_base 8: mod_base = OTHER; note = thymine
  modified_base 12: mod_base = OTHER; note = thymine
  misc_feature 1..18: note = Synthetic oligonucleotide
  modified_base order(1,2,3,4,5,6,7,8,9,10,11,12,13,14,15,16,17,18): mod_base = OTHER; note = phosphorothioate (PS) backbone modification
  modified_base order(1,2,3,4,15,16,17,18): mod_base = OTHER; note = 2'-O-methoxyethyl (2 MOE)
  modified_base order(1,3): mod_base = OTHER; note = 5-methyl cytosine
  modified_base order(7,10,13,14): mod_base = OTHER; note = 5-methyl cytosine
  source 1..18: mol_type = other RNA
ctcagactacatccaagg

SEQ ID NO: 1162 - RNA, 18 nt, synthetic construct
  modified_base 9: mod_base = OTHER; note = thymine
  modified_base 13: mod_base = OTHER; note = thymine
  misc_feature 1..18: note = Synthetic oligonucleotide
  modified_base order(1,2,3,4,5,6,7,8,9,10,11,12,13,14,15,16,17,18): mod_base = OTHER; note = phosphorothioate (PS) backbone modification
  modified_base order(1,2,3,4,15,16,17,18): mod_base = OTHER; note = 2'-O-methoxyethyl (2 MOE)
  modified_base order(1,2,4,15): mod_base = OTHER; note = 5-methyl cytosine
  modified_base order(8,11,14): mod_base = OTHER; note = 5-methyl cytosine
  source 1..18: mol_type = other RNA
cctcagactacatccaag

SEQ ID NO: 1163 - RNA, 18 nt, synthetic construct
  modified_base 10: mod_base = OTHER; note = thymine
  modified_base 14: mod_base = OTHER; note = thymine
  misc_feature 1..18: note = Synthetic oligonucleotide
  modified_base order(1,2,3,4,5,6,7,8,9,10,11,12,13,14,15,16,17,18): mod_base = OTHER; note = phosphorothioate (PS) backbone modification
  modified_base order(1,2,3,4,15,16,17,18): mod_base = OTHER; note = 2'-O-methoxyethyl (2 MOE)
  modified_base order(2,3,15,16): mod_base = OTHER; note = 5-methyl cytosine
  modified_base 4: mod_base = OTHER; note = (4) = 5-methyl uracil
  modified_base order(5,9,12): mod_base = OTHER; note = 5-methyl cytosine
  source 1..18: mol_type = other RNA
gcctcagactacatccaa

SEQ ID NO: 1164 - RNA, 18 nt, synthetic construct
  modified_base 5: mod_base = OTHER; note = thymine
  modified_base 11: mod_base = OTHER; note = thymine
  misc_feature 1..18: note = Synthetic oligonucleotide
  modified_base order(1,2,3,4,5,6,7,8,9,10,11,12,13,14,15,16,17,18): mod_base = OTHER; note = phosphorothioate (PS) backbone modification
  modified_base order(1,2,3,4,15,16,17,18): mod_base = OTHER; note = 2'-O-methoxyethyl (2 MOE)
  modified_base order(3,4,16,17): mod_base = OTHER; note = 5-methyl cytosine
  modified_base 15: mod_base = OTHER; note = 5-methyl uracil
  modified_base order(6,10,13): mod_base = OTHER; note = 5-methyl cytosine
  source 1..18: mol_type = other RNA
ggcctcagactacatcca

SEQ ID NO: 1165 - RNA, 18 nt, synthetic construct
  modified_base 6: mod_base = OTHER; note = thymine
  modified_base 12: mod_base = OTHER; note = thymine
  misc_feature 1..18: note = Synthetic oligonucleotide
  modified_base order(1,2,3,4,5,6,7,8,9,10,11,12,13,14,15,16,17,18): mod_base = OTHER; note = phosphorothioate (PS) backbone modification
  modified_base order(1,2,3,4,15,16,17,18): mod_base = OTHER; note = 2'-O-methoxyethyl (2 MOE)
  modified_base order(4,17,18): mod_base = OTHER; note = 5-methyl cytosine
  modified_base 16: mod_base = OTHER; note = 5-methyl uracil
  modified_base order(5,7,11,14): mod_base = OTHER; note = 5-methyl cytosine
  source 1..18: mol_type = other RNA
gggcctcagactacatcc

SEQ ID NO: 1166 - RNA, 18 nt, synthetic construct
  modified_base 7: mod_base = OTHER; note = thymine
  modified_base 13: mod_base = OTHER; note = thymine
  misc_feature 1..18: note = Synthetic oligonucleotide
  modified_base order(1,2,3,4,5,6,7,8,9,10,11,12,13,14,15,16,17,18): mod_base = OTHER; note = phosphorothioate (PS) backbone modification
  modified_base order(1,2,3,4,15,16,17,18): mod_base = OTHER; note = 2'-O-methoxyethyl (2 MOE)
  modified_base order(15,18): mod_base = OTHER; note = 5-methyl cytosine
  modified_base 17: mod_base = OTHER; note = 5-methyl uracil
  modified_base order(5,6,8,12): mod_base = OTHER; note = 5-methyl cytosine
  source 1..18: mol_type = other RNA
ggggcctcagactacatc

SEQ ID NO: 1167 - RNA, 18 nt, synthetic construct
  modified_base 8: mod_base = OTHER; note = thymine
  modified_base 14: mod_base = OTHER; note = thymine
  misc_feature 1..18: note = Synthetic oligonucleotide
  modified_base order(1,2,3,4,5,6,7,8,9,10,11,12,13,14,15,16,17,18): mod_base = OTHER; note = phosphorothioate (PS) backbone modification
  modified_base order(1,2,3,4,15,16,17,18): mod_base = OTHER; note = 2'-O-methoxyethyl (2 MOE)
  modified_base 16: mod_base = OTHER; note = 5-methyl cytosine
  modified_base 18: mod_base = OTHER; note = 5-methyl uracil
  modified_base order(6,7,9,13): mod_base = OTHER; note = 5-methyl cytosine
  source 1..18: mol_type = other RNA
aggggcctcagactacat

SEQ ID NO: 1168 - RNA, 18 nt, synthetic construct
  modified_base 9: mod_base = OTHER; note = thymine
  misc_feature 1..18: note = Synthetic oligonucleotide
  modified_base order(1,2,3,4,5,6,7,8,9,10,11,12,13,14,15,16,17,18): mod_base = OTHER; note = phosphorothioate (PS) backbone modification
  modified_base order(1,2,3,4,15,16,17,18): mod_base = OTHER; note = 2'-O-methoxyethyl (2 MOE)
  modified_base 17: mod_base = OTHER; note = 5-methyl cytosine
  modified_base 15: mod_base = OTHER; note = (15) = 5-methyl uracil
  modified_base order(7,8,10,14): mod_base = OTHER; note = 5-methyl cytosine
  source 1..18: mol_type = other RNA
aaggggcctcagactaca

SEQ ID NO: 1169 - RNA, 18 nt, synthetic construct
  modified_base 10: mod_base = OTHER; note = thymine
  misc_feature 1..18: note = Synthetic oligonucleotide
  modified_base order(1,2,3,4,5,6,7,8,9,10,11,12,13,14,15,16,17,18): mod_base = OTHER; note = phosphorothioate (PS) backbone modification
  modified_base order(1,2,3,4,15,16,17,18): mod_base = OTHER; note = 2'-O-methoxyethyl (2 MOE)
  modified_base order(15,18): mod_base = OTHER; note = 5-methyl cytosine
  modified_base order(1,16): mod_base = OTHER; note = 5-methyl uracil
  modified_base order(8,9,11): mod_base = OTHER; note = 5-methyl cytosine
  source 1..18: mol_type = other RNA
taaggggcctcagactac

SEQ ID NO: 1170 - RNA, 18 nt, synthetic construct
  modified_base 11: mod_base = OTHER; note = thymine
  misc_feature 1..18: note = Synthetic oligonucleotide
  modified_base order(1,2,3,4,5,6,7,8,9,10,11,12,13,14,15,16,17,18): mod_base = OTHER; note = phosphorothioate (PS) backbone modification
  modified_base order(1,2,3,4,15,16,17,18): mod_base = OTHER; note = 2'-O-methoxyethyl (2 MOE)
  modified_base 16: mod_base = OTHER; note = 5-methyl cytosine
  modified_base 17: mod_base = OTHER; note = 5-methyl uracil
  modified_base order(9,10,12): mod_base = OTHER; note = 5-methyl cytosine
  source 1..18: mol_type = other RNA
ttaaggggcctcagacta

SEQ ID NO: 1171 - RNA, 18 nt, synthetic construct
  modified_base 12: mod_base = OTHER; note = thymine
  misc_feature 1..18: note = Synthetic oligonucleotide
  modified_base order(1,2,3,4,5,6,7,8,9,10,11,12,13,14,15,16,17,18): mod_base = OTHER; note = phosphorothioate (PS) backbone modification
  modified_base order(1,2,3,4,15,16,17,18): mod_base = OTHER; note = 2'-O-methoxyethyl (2 MOE)
  modified_base 17: mod_base = OTHER; note = 5-methyl cytosine
  modified_base order(2,3,18): mod_base = OTHER; note = 5-methyl uracil
  modified_base order(10,11,13): mod_base = OTHER; note = 5-methyl cytosine
  source 1..18: mol_type = other RNA
gttaaggggcctcagact

SEQ ID NO: 1172 - RNA, 18 nt, synthetic construct
  modified_base 13: mod_base = OTHER; note = thymine
  misc_feature 1..18: note = Synthetic oligonucleotide
  modified_base order(1,2,3,4,5,6,7,8,9,10,11,12,13,14,15,16,17,18): mod_base = OTHER; note = phosphorothioate (PS) backbone modification
  modified_base order(1,2,3,4,15,16,17,18): mod_base = OTHER; note = 2'-O-methoxyethyl (2 MOE)
  modified_base 18: mod_base = OTHER; note = 5-methyl cytosine
  modified_base order(3,4): mod_base = OTHER; note = 5-methyl uracil
  modified_base order(11,12,14): mod_base = OTHER; note = 5-methyl cytosine
  source 1..18: mol_type = other RNA
agttaaggggcctcagac

SEQ ID NO: 1173 - RNA, 18 nt, synthetic construct
  modified_base 5: mod_base = OTHER; note = thymine
  modified_base 14: mod_base = OTHER; note = thymine
  misc_feature 1..18: note = Synthetic oligonucleotide
  modified_base order(1,2,3,4,5,6,7,8,9,10,11,12,13,14,15,16,17,18): mod_base = OTHER; note = phosphorothioate (PS) backbone modification
  modified_base order(1,2,3,4,15,16,17,18): mod_base = OTHER; note = 2'-O-methoxyethyl (2 MOE)
  modified_base 15: mod_base = OTHER; note = 5-methyl cytosine
  modified_base 4: mod_base = OTHER; note = 5-methyl uracil
  modified_base order(12,13): mod_base = OTHER; note = 5-methyl cytosine
  source 1..18: mol_type = other RNA
gagttaaggggcctcaga

SEQ ID NO: 1174 - RNA, 18 nt, synthetic construct
  modified_base 5..6: mod_base = OTHER; note = thymine
  misc_feature 1..18: note = Synthetic oligonucleotide
  modified_base order(1,2,3,4,5,6,7,8,9,10,11,12,13,14,15,16,17,18): mod_base = OTHER; note = phosphorothioate (PS) backbone modification
  modified_base order(1,2,3,4,15,16,17,18): mod_base = OTHER; note = 2'-O-methoxyethyl (2 MOE)
  modified_base 16: mod_base = OTHER; note = 5-methyl cytosine
  modified_base order(1,15): mod_base = OTHER; note = 5-methyl uracil
  modified_base order(13,14): mod_base = OTHER; note = 5-methyl cytosine
  source 1..18: mol_type = other RNA
tgagttaaggggcctcag

SEQ ID NO: 1175 - RNA, 18 nt, synthetic construct
  modified_base 6..7: mod_base = OTHER; note = thymine
  misc_feature 1..18: note = Synthetic oligonucleotide
  modified_base order(1,2,3,4,5,6,7,8,9,10,11,12,13,14,15,16,17,18): mod_base = OTHER; note = phosphorothioate (PS) backbone modification
  modified_base order(1,2,3,4,15,16,17,18): mod_base = OTHER; note = 2'-O-methoxyethyl (2 MOE)
  modified_base order(15,17): mod_base = OTHER; note = 5-methyl cytosine
  modified_base order(2,16): mod_base = OTHER; note = 5-methyl uracil
  modified_base 14: mod_base = OTHER; note = 5-methyl cytosine
  source 1..18: mol_type = other RNA
atgagttaaggggcctca

SEQ ID NO: 1176 - RNA, 18 nt, synthetic construct
  modified_base 7..8: mod_base = OTHER; note = thymine
  misc_feature 1..18: note = Synthetic oligonucleotide
  modified_base order(1,2,3,4,5,6,7,8,9,10,11,12,13,14,15,16,17,18): mod_base = OTHER; note = phosphorothioate (PS) backbone modification
  modified_base order(1,2,3,4,15,16,17,18): mod_base = OTHER; note = 2'-O-methoxyethyl (2 MOE)
  modified_base order(15,16,18): mod_base = OTHER; note = 5-methyl cytosine
  modified_base order(3,17): mod_base = OTHER; note = 5-methyl uracil
  source 1..18: mol_type = other RNA
gatgagttaaggggcctc

SEQ ID NO: 1177 - RNA, 18 nt, synthetic construct
  modified_base 8..9: mod_base = OTHER; note = thymine
  misc_feature 1..18: note = Synthetic oligonucleotide
  modified_base order(1,2,3,4,5,6,7,8,9,10,11,12,13,14,15,16,17,18): mod_base = OTHER; note = phosphorothioate (PS) backbone modification
  modified_base order(1,2,3,4,15,16,17,18): mod_base = OTHER; note = 2'-O-methoxyethyl (2 MOE)
  modified_base order(16,17): mod_base = OTHER; note = 5-methyl cytosine
  modified_base order(4,18): mod_base = OTHER; note = 5-methyl uracil
  source 1..18: mol_type = other RNA
agatgagttaaggggcct

SEQ ID NO: 1178 - RNA, 18 nt, synthetic construct
  modified_base 5: mod_base = OTHER; note = thymine
  modified_base 9..10: mod_base = OTHER; note = thymine
  misc_feature 1..18: note = Synthetic oligonucleotide
  modified_base order(1,2,3,4,5,6,7,8,9,10,11,12,13,14,15,16,17,18): mod_base = OTHER; note = phosphorothioate (PS) backbone modification
  modified_base order(1,2,3,4,15,16,17,18): mod_base = OTHER; note = 2'-O-methoxyethyl (2 MOE)
  modified_base order(1,17,18): mod_base = OTHER; note = 5-methyl cytosine
  source 1..18: mol_type = other RNA
cagatgagttaaggggcc

SEQ ID NO: 1179 - RNA, 18 nt, synthetic construct
  modified_base 6: mod_base = OTHER; note = thymine
  modified_base 10..11: mod_base = OTHER; note = thymine
  misc_feature 1..18: note = Synthetic oligonucleotide
  modified_base order(1,2,3,4,5,6,7,8,9,10,11,12,13,14,15,16,17,18): mod_base = OTHER; note = phosphorothioate (PS) backbone modification
  modified_base order(1,2,3,4,15,16,17,18): mod_base = OTHER; note = 2'-O-methoxyethyl (2 MOE)
  modified_base order(2,18): mod_base = OTHER; note = 5-methyl cytosine
  source 1..18: mol_type = other RNA
acagatgagttaaggggc

SEQ ID NO: 1180 - RNA, 18 nt, synthetic construct
  modified_base 7: mod_base = OTHER; note = thymine
  modified_base 11..12: mod_base = OTHER; note = thymine
  misc_feature 1..18: note = Synthetic oligonucleotide
  modified_base order(1,2,3,4,5,6,7,8,9,10,11,12,13,14,15,16,17,18): mod_base = OTHER; note = phosphorothioate (PS) backbone modification
  modified_base order(1,2,3,4,15,16,17,18): mod_base = OTHER; note = 2'-O-methoxyethyl (2 MOE)
  modified_base 3: mod_base = OTHER; note = 5-methyl cytosine
  source 1..18: mol_type = other RNA
aacagatgagttaagggg

SEQ ID NO: 1181 - RNA, 18 nt, synthetic construct
  modified_base 8: mod_base = OTHER; note = thymine
  modified_base 12..13: mod_base = OTHER; note = thymine
  misc_feature 1..18: note = Synthetic oligonucleotide
  modified_base order(1,2,3,4,5,6,7,8,9,10,11,12,13,14,15,16,17,18): mod_base = OTHER; note = phosphorothioate (PS) backbone modification
  modified_base order(1,2,3,4,15,16,17,18): mod_base = OTHER; note = 2'-O-methoxyethyl (2 MOE)
  modified_base 4: mod_base = OTHER; note = 5-methyl cytosine
  modified_base 1: mod_base = OTHER; note = 5-methyl uracil
  source 1..18: mol_type = other RNA
taacagatgagttaaggg

SEQ ID NO: 1182 - RNA, 18 nt, synthetic construct
  modified_base 9: mod_base = OTHER; note = thymine
  modified_base 13..14: mod_base = OTHER; note = thymine
  misc_feature 1..18: note = Synthetic oligonucleotide
  modified_base order(1,2,3,4,5,6,7,8,9,10,11,12,13,14,15,16,17,18): mod_base = OTHER; note = phosphorothioate (PS) backbone modification
  modified_base order(1,2,3,4,15,16,17,18): mod_base = OTHER; note = 2'-O-methoxyethyl (2 MOE)
  modified_base 2: mod_base = OTHER; note = 5-methyl uracil
  modified_base 5: mod_base = OTHER; note = 5-methyl cytosine
  source 1..18: mol_type = other RNA
ataacagatgagttaagg

SEQ ID NO: 1183 - RNA, 18 nt, synthetic construct
  modified_base 10: mod_base = OTHER; note = thymine
  modified_base 14: mod_base = OTHER; note = thymine
  misc_feature 1..18: note = Synthetic oligonucleotide
  modified_base order(1,2,3,4,5,6,7,8,9,10,11,12,13,14,15,16,17,18): mod_base = OTHER; note = phosphorothioate (PS) backbone modification
  modified_base order(1,2,3,4,15,16,17,18): mod_base = OTHER; note = 2'-O-methoxyethyl (2 MOE)
  modified_base order(3,15): mod_base = OTHER; note = 5-methyl uracil
  modified_base 6: mod_base = OTHER; note = 5-methyl cytosine
  source 1..18: mol_type = other RNA
gataacagatgagttaag

SEQ ID NO: 1184 - RNA, 18 nt, synthetic construct
  modified_base 11: mod_base = OTHER; note = thymine
  misc_feature 1..18: note = Synthetic oligonucleotide
  modified_base order(1,2,3,4,5,6,7,8,9,10,11,12,13,14,15,16,17,18): mod_base = OTHER; note = phosphorothioate (PS) backbone modification
  modified_base order(1,2,3,4,15,16,17,18): mod_base = OTHER; note = 2'-O-methoxyethyl (2 MOE)
  modified_base order(4,15,16): mod_base = OTHER; note = 5-methyl uracil
  modified_base 7: mod_base = OTHER; note = 5-methyl cytosine
  source 1..18: mol_type = other RNA
ggataacagatgagttaa

SEQ ID NO: 1185 - RNA, 18 nt, synthetic construct
  modified_base 5: mod_base = OTHER; note = thymine
  modified_base 12: mod_base = OTHER; note = thymine
  misc_feature 1..18: note = Synthetic oligonucleotide
  modified_base order(1,2,3,4,5,6,7,8,9,10,11,12,13,14,15,16,17,18): mod_base = OTHER; note = phosphorothioate (PS) backbone modification
  modified_base order(1,2,3,4,15,16,17,18): mod_base = OTHER; note = 2'-O-methoxyethyl (2 MOE)
  modified_base order(16,17): mod_base = OTHER; note = 5-methyl uracil
  modified_base 8: mod_base = OTHER; note = 5-methyl cytosine
  source 1..18: mol_type = other RNA
aggataacagatgagtta

SEQ ID NO: 1186 - RNA, 18 nt, synthetic construct
  modified_base 6: mod_base = OTHER; note = thymine
  modified_base 13: mod_base = OTHER; note = thymine
  misc_feature 1..18: note = Synthetic oligonucleotide
  modified_base order(1,2,3,4,5,6,7,8,9,10,11,12,13,14,15,16,17,18): mod_base = OTHER; note = phosphorothioate (PS) backbone modification
  modified_base order(1,2,3,4,15,16,17,18): mod_base = OTHER; note = 2'-O-methoxyethyl (2 MOE)
  modified_base 1: mod_base = OTHER; note = 5-methyl cytosine
  modified_base order(17,18): mod_base = OTHER; note = 5-methyl uracil
  modified_base 9: mod_base = OTHER; note = 5-methyl cytosine
  source 1..18: mol_type = other RNA
caggataacagatgagtt

SEQ ID NO: 1187 - RNA, 18 nt, synthetic construct
  modified_base 7: mod_base = OTHER; note = thymine
  modified_base 14: mod_base = OTHER; note = thymine
  misc_feature 1..18: note = Synthetic oligonucleotide
  modified_base order(1,2,3,4,5,6,7,8,9,10,11,12,13,14,15,16,17,18): mod_base = OTHER; note = phosphorothioate (PS) backbone modification
  modified_base order(1,2,3,4,15,16,17,18): mod_base = OTHER; note = 2'-O-methoxyethyl (2 MOE)
  modified_base 2: mod_base = OTHER; note = 5-methyl cytosine
  modified_base 18: mod_base = OTHER; note = 5-methyl uracil
  modified_base 10: mod_base = OTHER; note = 5-methyl cytosine
  source 1..18: mol_type = other RNA
gcaggataacagatgagt

SEQ ID NO: 1188 - RNA, 18 nt, synthetic construct
  modified_base 8: mod_base = OTHER; note = thymine
  misc_feature 1..18: note = Synthetic oligonucleotide
  modified_base order(1,2,3,4,5,6,7,8,9,10,11,12,13,14,15,16,17,18): mod_base = OTHER; note = phosphorothioate (PS) backbone modification
  modified_base order(1,2,3,4,15,16,17,18): mod_base = OTHER; note = 2'-O-methoxyethyl (2 MOE)
  modified_base 3: mod_base = OTHER; note = 5-methyl cytosine
  modified_base 15: mod_base = OTHER; note = 5-methyl uracil
  modified_base 11: mod_base = OTHER; note = 5-methyl cytosine
  source 1..18: mol_type = other RNA
agcaggataacagatgag

SEQ ID NO: 1189 - RNA, 18 nt, synthetic construct
  modified_base 6: mod_base = OTHER; note = thymine
  modified_base 10..12: mod_base = OTHER; note = thymine
  modified_base 14: mod_base = OTHER; note = thymine
  misc_feature 1..18: note = Synthetic oligonucleotide
  modified_base order(1,2,3,4,5,6,7,8,9,10,11,12,13,14,15,16,17,18): mod_base = OTHER; note = phosphorothioate (PS) backbone modification
  modified_base order(1,2,3,4,15,16,17,18): mod_base = OTHER; note = 2'-O-methoxyethyl (2 MOE)
  modified_base order(1,16): mod_base = OTHER; note = 5-methyl cytosine
  modified_base order(8,13): mod_base = OTHER; note = 5-methyl cytosine
  source 1..18: mol_type = other RNA
caggatacatttctacag

SEQ ID NO: 1190 - RNA, 18 nt, synthetic construct
  modified_base 5: mod_base = OTHER; note = thymine
  modified_base 13: mod_base = OTHER; note = thymine
  misc_feature 1..18: note = Synthetic oligonucleotide
  modified_base order(1,2,3,4,5,6,7,8,9,10,11,12,13,14,15,16,17,18): mod_base = OTHER; note = phosphorothioate (PS) backbone modification
  modified_base order(1,2,3,4,15,16,17,18): mod_base = OTHER; note = 2'-O-methoxyethyl (2 MOE)
  modified_base order(2,4,16,18): mod_base = OTHER; note = 5-methyl cytosine
  modified_base 14: mod_base = OTHER; note = 5-methyl cytosine
  source 1..18: mol_type = other RNA
actctgaaaaagtcacac

SEQ ID NO: 1191 - RNA, 18 nt, synthetic construct
  modified_base 6: mod_base = OTHER; note = thymine
  modified_base 8: mod_base = OTHER; note = thymine
  misc_feature 1..18: note = Synthetic oligonucleotide
  modified_base order(1,2,3,4,5,6,7,8,9,10,11,12,13,14,15,16,17,18): mod_base = OTHER; note = phosphorothioate (PS) backbone modification
  modified_base order(1,2,3,4,15,16,17,18): mod_base = OTHER; note = 2'-O-methoxyethyl (2 MOE)
  modified_base order(2,17): mod_base = OTHER; note = 5-methyl cytosine
  modified_base 16: mod_base = OTHER; note = 5-methyl uracil
  modified_base order(5,7): mod_base = OTHER; note = 5-methyl cytosine
  source 1..18: mol_type = other RNA
gcaactctgaaaaagtca

SEQ ID NO: 1192 - RNA, 18 nt, synthetic construct
  modified_base 7: mod_base = OTHER; note = thymine
  modified_base 9: mod_base = OTHER; note = thymine
  misc_feature 1..18: note = Synthetic oligonucleotide
  modified_base order(1,2,3,4,5,6,7,8,9,10,11,12,13,14,15,16,17,18): mod_base = OTHER; note = phosphorothioate (PS) backbone modification
  modified_base order(1,2,3,4,15,16,17,18): mod_base = OTHER; note = 2'-O-methoxyethyl (2 MOE)
  modified_base order(3,18): mod_base = OTHER; note = 5-methyl cytosine
  modified_base 17: mod_base = OTHER; note = 5-methyl uracil
  modified_base order(6,8): mod_base = OTHER; note = 5-methyl cytosine
  source 1..18: mol_type = other RNA
agcaactctgaaaaagtc

SEQ ID NO: 1193 - RNA, 18 nt, synthetic construct
  modified_base 5: mod_base = OTHER; note = thymine
  modified_base 7: mod_base = OTHER; note = thymine
  modified_base 11: mod_base = OTHER; note = thymine
  misc_feature 1..18: note = Synthetic oligonucleotide
  modified_base order(1,2,3,4,5,6,7,8,9,10,11,12,13,14,15,16,17,18): mod_base = OTHER; note = phosphorothioate (PS) backbone modification
  modified_base order(1,2,3,4,15,16,17,18): mod_base = OTHER; note = 2'-O-methoxyethyl (2 MOE)
  modified_base order(3,4,17): mod_base = OTHER; note = 5-methyl uracil
  modified_base order(6,8,10,13): mod_base = OTHER; note = 5-methyl cytosine
  source 1..18: mol_type = other RNA
agtttctcactacaggta

SEQ ID NO: 1194 - RNA, 18 nt, synthetic construct
  modified_base 5..6: mod_base = OTHER; note = thymine
  modified_base 8: mod_base = OTHER; note = thymine
  modified_base 12: mod_base = OTHER; note = thymine
  misc_feature 1..18: note = Synthetic oligonucleotide
  modified_base order(1,2,3,4,5,6,7,8,9,10,11,12,13,14,15,16,17,18): mod_base = OTHER; note = phosphorothioate (PS) backbone modification
  modified_base order(1,2,3,4,15,16,17,18): mod_base = OTHER; note = 2'-O-methoxyethyl (2 MOE)
  modified_base 1: mod_base = OTHER; note = 5-methyl cytosine
  modified_base order(4,18): mod_base = OTHER; note = 5-methyl uracil
  modified_base order(7,9,11,14): mod_base = OTHER; note = 5-methyl cytosine
  source 1..18: mol_type = other RNA
cagtttctcactacaggt

SEQ ID NO: 1195 - RNA, 18 nt, synthetic construct
  modified_base 6..8: mod_base = OTHER; note = thymine
  modified_base 10: mod_base = OTHER; note = thymine
  modified_base 14: mod_base = OTHER; note = thymine
  misc_feature 1..18: note = Synthetic oligonucleotide
  modified_base order(1,2,3,4,5,6,7,8,9,10,11,12,13,14,15,16,17,18): mod_base = OTHER; note = phosphorothioate (PS) backbone modification
  modified_base order(1,2,3,4,15,16,17,18): mod_base = OTHER; note = 2'-O-methoxyethyl (2 MOE)
  modified_base order(3,16): mod_base = OTHER; note = 5-methyl cytosine
  modified_base 2: mod_base = OTHER; note = 5-methyl uracil
  modified_base order(9,11,13): mod_base = OTHER; note = 5-methyl cytosine
  source 1..18: mol_type = other RNA
atcagtttctcactacag

SEQ ID NO: 1196 - RNA, 20 nt, synthetic construct
  misc_feature 1..20: note = Synthetic oligonucleotide
  modified_base order(1,2,3,18,19,20): mod_base = OTHER; note = phosphorothioate (PS) backbone modification
  modified_base order(2,4,6,8,9,10,11,12,14,16,18,20): mod_base = OTHER; note = 2'-fluoro
  modified_base order(1,3,5,7,13,15,17,19): mod_base = OTHER; note = 2'-O-methyl
  source 1..20: mol_type = other RNA
aggtggaaatgaagaaagta

SEQ ID NO: 1197 - RNA, 34 nt, synthetic construct
  misc_feature 1..34: note = Synthetic oligonucleotide
  modified_base order(1,2,3,18,19,20,21,22,23,24,25,26,27,28,29,30,31,32,33,34): mod_base = OTHER; note = phosphorothioate (PS) backbone modification
  modified_base order(2,4,6,8,9,10,11,12,14,16,18,20): mod_base = OTHER; note = 2'-fluoro
  modified_base order(1,3,5,7,13,15,17,19): mod_base = OTHER; note = 2'-O-methyl
  modified_base order(21,22,23,24,25,26,27,28,29,30,31,32,33,34): mod_base = OTHER; note = 2'-O-methoxyethyl (2 MOE)
  modified_base 28: mod_base = OTHER; note = 5-methyl cytosine
  modified_base order(21,22,24,26,27,29,31,33,34): mod_base = OTHER; note = 5-methyl uracil
  modified_base 20: mod_base = OTHER; note = Spacer-9 linker (2-(2-(2-(bis(4-methoxyphenyl)(phenyl)methoxy)ethoxy)ethoxy )ethyl (2-cyanoethyl) diisopropylphosphoramidite)
  source 1..34: mol_type = other RNA
aggtggaaatgaagaaagtattgtattctatgtt

SEQ ID NO: 1198 - RNA, 34 nt, synthetic construct; identical to SEQ ID NO: 1197
  misc_feature 1..34: note = Synthetic oligonucleotide
  modified_base order(1,2,3,18,19,20,21,22,23,24,25,26,27,28,29,30,31,32,33,34): mod_base = OTHER; note = phosphorothioate (PS) backbone modification
  modified_base order(2,4,6,8,9,10,11,12,14,16,18,20): mod_base = OTHER; note = 2'-fluoro
  modified_base order(1,3,5,7,13,15,17,19): mod_base = OTHER; note = 2'-O-methyl
  modified_base order(21,22,23,24,25,26,27,28,29,30,31,32,33,34): mod_base = OTHER; note = 2'-O-methoxyethyl (2 MOE)
  modified_base 28: mod_base = OTHER; note = 5-methyl cytosine
  modified_base order(21,22,24,26,27,29,31,33,34): mod_base = OTHER; note = 5-methyl uracil
  modified_base 20: mod_base = OTHER; note = spacer-18 (S18 linker (1,1-bis(4-methoxyphenyl)-1-phenyl-2,5,8,11,14,17-hexaoxano nadecan-19-yl (2-cyanoethyl) diisopropylphosphoramidite))
  source 1..34: mol_type = other RNA

SEQ ID NO: 1199 - RNA, 35 nt, synthetic construct
  misc_feature 1..35: note = Synthetic oligonucleotide
  modified_base order(1,2,3,18,19,20,22,23,24,25,26,27,28,29,30,31,32,33,34,35): mod_base = OTHER; note = phosphorothioate (PS) backbone modification
  modified_base order(2,4,6,8,9,10,11,12,14,16,18,20): mod_base = OTHER; note = 2'-fluoro
  modified_base order(1,3,5,7,13,15,17,19): mod_base = OTHER; note = 2'-O-methyl
  modified_base order(22,23,24,25,26,27,28,29,30,31,32,33,34,35): mod_base = OTHER; note = 2'-O-methoxyethyl (2 MOE)
  modified_base 29: mod_base = OTHER; note = 5-methyl cytosine
  modified_base order(22,23,25,27,28,30,32,34,35): mod_base = OTHER; note = 5-methyl uracil
  modified_base 20: mod_base = OTHER; note = Spacer-C6 linker (6-(bis(4-methoxyphenyl)(phenyl)methoxy)hexyl (2-cyanoethyl) diisopropylphosphoramidite)
  source 1..35: mol_type = other RNA
aggtggaaatgaagaaagtacttgtattctatgtt

SEQ ID NO: 1200 - RNA, 39 nt, synthetic construct
  misc_feature 1..39: note = Synthetic oligonucleotide
  modified_base order(1,2,3,18,19,20,26,27,28,29,30,31,32,33,34,35,36,37,38,39): mod_base = OTHER; note = phosphorothioate (PS) backbone modification
  modified_base order(2,4,6,8,9,10,11,12,14,16,18,20): mod_base = OTHER; note = 2'-fluoro
  modified_base order(1,3,5,7,13,15,17,19): mod_base = OTHER; note = 2'-O-methyl
  modified_base order(26,27,28,29,30,31,32,33,34,35,36,37,38,39): mod_base = OTHER; note = 2'-O-methoxyethyl (2 MOE)
  modified_base 33: mod_base = OTHER; note = 5-methyl cytosine
  modified_base order(26,27,29,31,32,34,36,38,39): mod_base = OTHER; note = 5-methyl uracil
  source 1..39: mol_type = other RNA
aggtggaaatgaagaaagtattacattgtattctatgtt

SEQ ID NO: 1201 - RNA, 39 nt, synthetic construct
  misc_feature 1..39: note = Synthetic oligonucleotide
  modified_base order(1,2,3,18,19,20,26,27,28,29,30,31,32,33,34,35,36,37,38,39): mod_base = OTHER; note = phosphorothioate (PS) backbone modification
  modified_base order(2,4,6,8,9,10,11,12,14,16,18,20): mod_base = OTHER; note = 2'-fluoro
  modified_base order(1,3,5,7,13,15,17,19): mod_base = OTHER; note = 2'-O-methyl
  modified_base order(26,27,28,29,30,31,32,33,34,35,36,37,38,39): mod_base = OTHER; note = 2'-O-methoxyethyl (2 MOE)
  modified_base 33: mod_base = OTHER; note = 5-methyl cytosine
  modified_base order(26,27,29,31,32,34,36,38,39): mod_base = OTHER; note = 5-methyl uracil
  source 1..39: mol_type = other RNA
aggtggaaatgaagaaagtattcttttgtattctatgtt

SEQ ID NO: 1202 - RNA, 35 nt, synthetic construct; identical to SEQ ID NO: 1199
  misc_feature 1..35: note = Synthetic oligonucleotide
  modified_base order(1,2,3,18,19,20,22,23,24,25,26,27,28,29,30,31,32,33,34,35): mod_base = OTHER; note = phosphorothioate (PS) backbone modification
  modified_base order(2,4,6,8,9,10,11,12,14,16,18,20): mod_base = OTHER; note = 2'-fluoro
  modified_base order(1,3,5,7,13,15,17,19): mod_base = OTHER; note = 2'-O-methyl
  modified_base order(22,23,24,25,26,27,28,29,30,31,32,33,34,35): mod_base = OTHER; note = 2'-O-methoxyethyl (2 MOE)
  modified_base 29: mod_base = OTHER; note = 5-methyl cytosine
  modified_base order(22,23,25,27,28,30,32,34,35): mod_base = OTHER; note = 5-methyl uracil
  modified_base 20: mod_base = OTHER; note = spacer-C3 linker (3-(bis(4-methoxyphenyl)(phenyl)methoxy)propyl (2-cyanoethyl) diisopropylphosphoramidite)
  source 1..35: mol_type = other RNA

SEQ ID NO: 1203 - RNA, 20 nt, synthetic construct
  misc_feature 1..20: note = Synthetic oligonucleotide
  source 1..20: mol_type = other RNA
atcgtgcatactggaatccg

SEQ ID NO: 1204 - RNA, 36 nt, synthetic construct
  misc_feature 1..36: note = Synthetic oligonucleotide
  modified_base order(1,2,3,18,19,20,23,24,25,26,27,28,29,30,31,32,33,34,35,36): mod_base = OTHER; note = phosphorothioate (PS) backbone modification
  modified_base order(2,4,6,8,9,10,11,12,14,16,18,20): mod_base = OTHER; note = 2'-fluoro
  modified_base order(1,3,5,7,13,15,17,19): mod_base = OTHER; note = 2'-O-methyl
  modified_base order(23,24,25,26,27,28,29,30,31,32,33,34,35,36): mod_base = OTHER; note = 2'-O-methoxyethyl (2 MOE)
  modified_base 21: mod_base = OTHER; note = 5'-phosophate
  modified_base 30: mod_base = OTHER; note = 5-methyl cytosine
  modified_base order(23,24,26,28,29,31,33,35,36): mod_base = OTHER; note = 5-methyl uracil
  modified_base 21: mod_base = OTHER; note = d spacer ((2R,3S)-2-((bis(4-methoxyphenyl)(phenyl)methoxy)methyl)tet rahydrofuran-3-yl (2-cyanoethyl) diisopropylphosphoramidite)
  source 1..36: mol_type = other RNA
aggtggaaatgaagaaagtaacttgtattctatgtt

SEQ ID NO: 1205 - RNA, 35 nt, synthetic construct; identical to SEQ ID NO: 1199
  misc_feature 1..35: note = Synthetic oligonucleotide
  modified_base order(1,2,3,18,19,20,22,23,24,25,26,27,28,29,30,31,32,33,34,35): mod_base = OTHER; note = phosphorothioate (PS) backbone modification
  modified_base order(2,4,6,8,9,10,11,12,14,16,18,20): mod_base = OTHER; note = 2'-fluoro
  modified_base order(1,3,5,7,13,15,17,19): mod_base = OTHER; note = 2'-O-methyl
  modified_base order(22,23,24,25,26,27,28,29,30,31,32,33,34,35): mod_base = OTHER; note = 2'-O-methoxyethyl (2 MOE)
  modified_base 29: mod_base = OTHER; note = 5-methyl cytosine
  modified_base order(22,23,25,27,28,30,32,34,35): mod_base = OTHER; note = 5-methyl uracil
  modified_base 20: mod_base = OTHER; note = Spacer-C12 linker (12-(bis(4-methoxyphenyl)(phenyl)methoxy)dodecyl (2-cyanoethyl) diisopropylphosphoramidite)
  source 1..35: mol_type = other RNA

SEQ ID NO: 1206 - RNA, 34 nt, synthetic construct; identical to SEQ ID NO: 1197
  misc_feature 1..34: note = Synthetic oligonucleotide
  modified_base order(1,2,3,18,19,20,21,22,23,24,25,26,27,28,29,30,31,32,33,34): mod_base = OTHER; note = phosphorothioate (PS) backbone modification
  modified_base order(2,4,6,8,9,10,11,12,14,16,18,20): mod_base = OTHER; note = 2'-fluoro
  modified_base order(1,3,5,7,13,15,17,19): mod_base = OTHER; note = 2'-O-methyl
  modified_base order(21,22,23,24,25,26,27,28,29,30,31,32,33,34): mod_base = OTHER; note = 2'-O-methoxyethyl (2 MOE)
  modified_base 28: mod_base = OTHER; note = 5-methyl cytosine
  modified_base order(21,22,24,26,27,29,31,33,34): mod_base = OTHER; note = 5-methyl uracil
  misc_feature 1..34: note = modified_base<222(20) - L14, spacer-L14 linker (((1r,4r)-4-((bis(4-methoxyphenyl)(phenyl)methoxy)methyl)cy clohexyl)methyl (2-cyanoethyl) diisopropylphosphoramidite)
  source 1..34: mol_type = other RNA

SEQ ID NO: 1207 - RNA, 34 nt, synthetic construct; identical to SEQ ID NO: 1197
  misc_feature 1..34: note = Synthetic oligonucleotide
  modified_base order(1,2,3,18,19,20,21,22,23,24,25,26,27,28,29,30,31,32,33,34): mod_base = OTHER; note = phosphorothioate (PS) backbone modification
  modified_base order(2,4,6,8,9,10,11,12,14,16,18,20): mod_base = OTHER; note = 2'-fluoro
  modified_base order(1,3,5,7,13,15,17,19): mod_base = OTHER; note = 2'-O-methyl
  modified_base order(21,22,23,24,25,26,27,28,29,30,31,32,33,34): mod_base = OTHER; note = 2'-O-methoxyethyl (2 MOE)
  modified_base 28: mod_base = OTHER; note = 5-methyl cytosine
  modified_base order(21,22,24,26,27,29,31,33,34): mod_base = OTHER; note = 5-methyl uracil
  modified_base 20: mod_base = OTHER; note = L15, spacer-L15 linker (4-(2-(bis(4-methoxyphenyl)(phenyl)methoxy)ethyl)phenethyl (2-cyanoethyl) diisopropylphosphoramidite)
  source 1..34: mol_type = other RNA

SEQ ID NO: 1208 - RNA, 34 nt, synthetic construct; identical to SEQ ID NO: 1197
  misc_feature 1..34: note = Synthetic oligonucleotide
  modified_base order(1,2,3,18,19,20,21,22,23,24,25,26,27,28,29,30,31,32,33,34): mod_base = OTHER; note = phosphorothioate (PS) backbone modification
  modified_base order(2,4,6,8,9,10,11,12,14,16,18,20): mod_base = OTHER; note = 2'-fluoro
  modified_base order(1,3,5,7,13,15,17,19): mod_base = OTHER; note = 2'-O-methyl
  modified_base order(21,22,23,24,25,26,27,28,29,30,31,32,33,34): mod_base = OTHER; note = 2'-O-methoxyethyl (2 MOE)
  modified_base 28: mod_base = OTHER; note = 5-methyl cytosine
  modified_base order(21,22,24,26,27,29,31,33,34): mod_base = OTHER; note = 5-methyl uracil
  modified_base 20: mod_base = OTHER; note = L16, spacer-L16 linker (2-(1-(2-(bis(4-methoxyphenyl)(phenyl)methoxy)ethyl)cyclohe xyl)ethyl (2-cyanoethyl) diisopropylphosphoramidite)
  source 1..34: mol_type = other RNA

SEQ ID NO: 1209 - RNA, 34 nt, synthetic construct
  misc_feature 1..34: note = Synthetic oligonucleotide
  modified_base order(1,2,3,18,19,20,21,22,23,24,25,26,27,28,29,30,31,32,33,34): mod_base = OTHER; note = phosphorothioate (PS) backbone modification
  modified_base order(2,4,6,8,9,10,11,12,14,16,18,20): mod_base = OTHER; note = 2'-fluoro
  modified_base order(1,3,5,7,13,15,17,19): mod_base = OTHER; note = 2'-O-methyl
  modified_base order(21,22,23,24,25,26,27,28,29,30,31,32,33,34): mod_base = OTHER; note = 2'-O-methoxyethyl (2 MOE)
  modified_base 28: mod_base = OTHER; note = 5-methyl cytosine
  modified_base order(21,22,24,26,27,29,30,32,34): mod_base = OTHER; note = 5-methyl uracil
  modified_base 20: mod_base = OTHER; note = Spacer-9 linker (2-(2-(2-(bis(4-methoxyphenyl)(phenyl)methoxy)ethoxy)ethoxy )ethyl (2-cyanoethyl) diisopropylphosphoramidite)
  source 1..34: mol_type = other RNA
aggtggaaatgaagaaagtattgtattcttgtat

SEQ ID NO: 1210 - RNA, 34 nt, synthetic construct
  misc_feature 1..34: note = Synthetic oligonucleotide
  modified_base order(1,2,3,18,19,20,21,22,23,24,25,26,27,28,29,30,31,32,33,34): mod_base = OTHER; note = phosphorothioate (PS) backbone modification
  modified_base order(2,4,6,8,9,10,11,12,14,16,18,20): mod_base = OTHER; note = 2'-fluoro
  modified_base order(1,3,5,7,13,15,17,19): mod_base = OTHER; note = 2'-O-methyl
  modified_base order(21,22,23,24,25,26,27,28,29,30,31,32,33,34): mod_base = OTHER; note = 2'-O-methoxyethyl (2 MOE)
  modified_base 28: mod_base = OTHER; note = 5-methyl cytosine
  modified_base order(21,23,25,26,27,29,31,33,34): mod_base = OTHER; note = 5-methyl uracil
  modified_base 20: mod_base = OTHER; note = Spacer-9 linker (2-(2-(2-(bis(4-methoxyphenyl)(phenyl)methoxy)ethoxy)ethoxy )ethyl (2-cyanoethyl) diisopropylphosphoramidite)
  source 1..34: mol_type = other RNA
aggtggaaatgaagaaagtatatgtttctatgtt

SEQ ID NO: 1211 - RNA, 34 nt, synthetic construct
  misc_feature 1..34: note = Synthetic oligonucleotide
  modified_base order(1,2,3,18,19,20,21,22,23,24,25,26,27,28,29,30,31,32,33,34): mod_base = OTHER; note = phosphorothioate (PS) backbone modification
  modified_base order(2,4,6,8,9,10,11,12,14,16,18,20): mod_base = OTHER; note = 2'-fluoro
  modified_base order(1,3,5,7,13,15,17,19): mod_base = OTHER; note = 2'-O-methyl
  modified_base order(21,22,23,24,25,26,27,28,29,30,31,32,33,34): mod_base = OTHER; note = 2'-O-methoxyethyl (2 MOE)
  modified_base 27: mod_base = OTHER; note = 5-methyl cytosine
  modified_base order(21,22,24,26,28,29,31,33,34): mod_base = OTHER; note = 5-methyl uracil
  modified_base 20: mod_base = OTHER; note = Spacer-9 linker (2-(2-(2-(bis(4-methoxyphenyl)(phenyl)methoxy)ethoxy)ethoxy )ethyl (2-cyanoethyl) diisopropylphosphoramidite)
  source 1..34: mol_type = other RNA
aggtggaaatgaagaaagtattgtatcttatgtt

SEQ ID NO: 1212 - RNA, 32 nt, synthetic construct
  misc_feature 1..32: note = Synthetic oligonucleotide
  modified_base order(1,2,3,18,19,20,21,22,23,24,25,26,27,28,29,30,31,32): mod_base = OTHER; note = phosphorothioate (PS) backbone modification
  modified_base order(2,4,6,8,9,10,11,12,14,16,18,20): mod_base = OTHER; note = 2'-fluoro
  modified_base order(1,3,5,7,13,15,17,19): mod_base = OTHER; note = 2'-O-methyl
  modified_base order(21,22,23,24,25,26,27,28,29,30,31,32): mod_base = OTHER; note = 2'-O-methoxyethyl (2 MOE)
  modified_base order(21,22,24,26,27,29,31,32): mod_base = OTHER; note = 5-methyl uracil
  modified_base 20: mod_base = OTHER; note = Spacer-9 linker (2-(2-(2-(bis(4-methoxyphenyl)(phenyl)methoxy)ethoxy)ethoxy )ethyl (2-cyanoethyl) diisopropylphosphoramidite)
  source 1..32: mol_type = other RNA
aggtggaaatgaagaaagtattgtattatgtt

SEQ ID NO: 1213 - RNA, 34 nt, synthetic construct
  misc_feature 1..34: note = Synthetic oligonucleotide
  modified_base order(1,2,3,18,19,20,21,22,23,24,25,26,27,28,29,30,31,32,33,34): mod_base = OTHER; note = phosphorothioate (PS) backbone modification
  modified_base order(2,4,6,8,9,10,11,12,14,16,18,20): mod_base = OTHER; note = 2'-fluoro
  modified_base order(1,3,5,7,13,15,17,19): mod_base = OTHER; note = 2'-O-methyl
  modified_base order(21,22,23,24,25,26,27,28,29,30,31,32,33,34): mod_base = OTHER; note = 2'-O-methoxyethyl (2 MOE)
  modified_base order(27,28): mod_base = OTHER; note = 5-methyl cytosine
  modified_base order(21,22,24,26,29,31,33,34): mod_base = OTHER; note = 5-methyl uracil
  modified_base 20: mod_base = OTHER; note = Spacer-9 linker (2-(2-(2-(bis(4-methoxyphenyl)(phenyl)methoxy)ethoxy)ethoxy )ethyl (2-cyanoethyl) diisopropylphosphoramidite)
  source 1..34: mol_type = other RNA
aggtggaaatgaagaaagtattgtatcctatgtt

SEQ ID NO: 1214 - RNA, 26 nt, synthetic construct
  misc_feature 1..26: note = Synthetic oligonucleotide
  modified_base order(1,2,3,18,19,20,21,22,23,24,25,26): mod_base = OTHER; note = phosphorothioate (PS) backbone modification
  modified_base order(2,4,6,8,9,10,11,12,14,16,18,20): mod_base = OTHER; note = 2'-fluoro
  modified_base order(1,3,5,7,13,15,17,19): mod_base = OTHER; note = 2'-O-methyl
  modified_base order(21,22,23,24,25,26): mod_base = OTHER; note = 2'-O-methoxyethyl (2 MOE)
  modified_base order(21,22,24,26): mod_base = OTHER; note = 5-methyl uracil
  modified_base 20: mod_base = OTHER; note = Spacer-9 linker (2-(2-(2-(bis(4-methoxyphenyl)(phenyl)methoxy)ethoxy)ethoxy )ethyl (2-cyanoethyl) diisopropylphosphoramidite)
  source 1..26: mol_type = other RNA
aggtggaaatgaagaaagtattgtat

SEQ ID NO: 1215 - RNA, 28 nt, synthetic construct
  misc_feature 1..28: note = Synthetic oligonucleotide
  modified_base order(1,2,3,18,19,20,21,22,23,24,25,26,27,28): mod_base = OTHER; note = phosphorothioate (PS) backbone modification
  modified_base order(2,4,6,8,9,10,11,12,14,16,18,20): mod_base = OTHER; note = 2'-fluoro
  modified_base order(1,3,5,7,13,15,17,19): mod_base = OTHER; note = 2'-O-methyl
  modified_base order(21,22,23,24,25,26,27,28): mod_base = OTHER; note = 2'-O-methoxyethyl (2 MOE)
  modified_base 28: mod_base = OTHER; note = 5-methyl cytosine
  modified_base order(21,22,24,26,27): mod_base = OTHER; note = 5-methyl uracil
  modified_base 20: mod_base = OTHER; note = Spacer-9 linker (2-(2-(2-(bis(4-methoxyphenyl)(phenyl)methoxy)ethoxy)ethoxy )ethyl (2-cyanoethyl) diisopropylphosphoramidite)
  source 1..28: mol_type = other RNA
aggtggaaatgaagaaagtattgtattc

SEQ ID NO: 1216 - RNA, 31 nt, synthetic construct
  misc_feature 1..31: note = Synthetic oligonucleotide
  modified_base order(1,2,3,18,19,20,21,22,23,24,25,26,27,28,29,30,31): mod_base = OTHER; note = phosphorothioate (PS) backbone modification
  modified_base order(2,4,6,8,9,10,11,12,14,16,18,20): mod_base = OTHER; note = 2'-fluoro
  modified_base order(1,3,5,7,13,15,17,19): mod_base = OTHER; note = 2'-O-methyl
  modified_base order(21,22,23,24,25,26,27,28,29,30,31): mod_base = OTHER; note = 2'-O-methoxyethyl (2 MOE)
  modified_base 28: mod_base = OTHER; note = 5-methyl cytosine
  modified_base order(21,22,24,26,27,29,31): mod_base = OTHER; note = 5-methyl uracil
  modified_base 20: mod_base = OTHER; note = Spacer-9 linker (2-(2-(2-(bis(4-methoxyphenyl)(phenyl)methoxy)ethoxy)ethoxy )ethyl (2-cyanoethyl) diisopropylphosphoramidite)
  source 1..31: mol_type = other RNA
aggtggaaatgaagaaagtattgtattctat

SEQ ID NO: 1217 - RNA, 34 nt, synthetic construct
  misc_feature 1..34: note = Synthetic oligonucleotide
  modified_base order(1,2,3,18,19,20,21,22,23,24,25,26,27,28,29,30,31,32,33,34): mod_base = OTHER; note = phosphorothioate (PS) backbone modification
  modified_base order(2,4,6,8,9,10,11,12,14,16,18,20): mod_base = OTHER; note = 2'-fluoro
  modified_base order(1,3,5,7,13,15,17,19): mod_base = OTHER; note = 2'-O-methyl
  modified_base order(21,22,23,24,25,26,27,28,29,30,31,32,33,34): mod_base = OTHER; note = 2'-O-methoxyethyl (2 MOE)
  modified_base order(21,22,24,26,29,31,33,34): mod_base = OTHER; note = 5-methyl uracil
  modified_base 20: mod_base = OTHER; note = Spacer-9 linker (2-(2-(2-(bis(4-methoxyphenyl)(phenyl)methoxy)ethoxy)ethoxy )ethyl (2-cyanoethyl) diisopropylphosphoramidite)
  source 1..34: mol_type = other RNA
aggtggaaatgaagaaagtattgtatagtatgtt

SEQ ID NO: 1218 - RNA, 34 nt, synthetic construct
  misc_feature 1..34: note = Synthetic oligonucleotide
  modified_base order(1,2,3,18,19,20,21,22,23,24,25,26,27,28,29,30,31,32,33,34): mod_base = OTHER; note = phosphorothioate (PS) backbone modification
  modified_base order(2,4,6,8,9,10,11,12,14,16,18,20): mod_base = OTHER; note = 2'-fluoro
  modified_base order(1,3,5,7,13,15,17,19): mod_base = OTHER; note = 2'-O-methyl
  modified_base order(21,22,23,24,25,26,27,28,29,30,31,32,33,34): mod_base = OTHER; note = 2'-O-methoxyethyl (2 MOE)
  modified_base 28: mod_base = OTHER; note = 5-methyl cytosine
  modified_base order(21,24,26,27,29,31,34): mod_base = OTHER; note = 5-methyl uracil
  modified_base 20: mod_base = OTHER; note = Spacer-9 linker (2-(2-(2-(bis(4-methoxyphenyl)(phenyl)methoxy)ethoxy)ethoxy )ethyl (2-cyanoethyl) diisopropylphosphoramidite)
  source 1..34: mol_type = other RNA
aggtggaaatgaagaaagtatagtattctatgat

SEQ ID NO: 1219 - RNA, 34 nt, synthetic construct
  misc_feature 1..34: note = Synthetic oligonucleotide
  modified_base order(1,2,3,18,19,20,21,22,23,24,25,26,27,28,29,30,31,32,33,34): mod_base = OTHER; note = phosphorothioate (PS) backbone modification
  modified_base order(2,4,6,8,9,10,11,12,14,16,18,20): mod_base = OTHER; note = 2'-fluoro
  modified_base order(1,3,5,7,13,15,17,19): mod_base = OTHER; note = 2'-O-methyl
  modified_base order(21,22,23,24,25,26,27,28,29,30,31,32,33,34): mod_base = OTHER; note = 2'-O-methoxyethyl (2 MOE)
  modified_base order(23,28,32): mod_base = OTHER; note = 5-methyl cytosine
  modified_base order(21,24,26,27,29,31,34): mod_base = OTHER; note = 5-methyl uracil
  modified_base 20: mod_base = OTHER; note = Spacer-9 linker (2-(2-(2-(bis(4-methoxyphenyl)(phenyl)methoxy)ethoxy)ethoxy )ethyl (2-cyanoethyl) diisopropylphosphoramidite)
  source 1..34: mol_type = other RNA
aggtggaaatgaagaaagtatactattctatcat

SEQ ID NO: 1220 - RNA, 34 nt, synthetic construct
  misc_feature 1..34: note = Synthetic oligonucleotide
  modified_base order(1,2,3,18,19,20,21,22,23,24,25,26,27,28,29,30,31,32,33,34): mod_base = OTHER; note = phosphorothioate (PS) backbone modification
  modified_base order(2,4,6,8,9,10,11,12,14,16,18,20): mod_base = OTHER; note = 2'-fluoro
  modified_base order(1,3,5,7,13,15,17,19): mod_base = OTHER; note = 2'-O-methyl
  modified_base order(21,22,23,24,25,26,27,28,29,30,31,32,33,34): mod_base = OTHER; note = 2'-O-methoxyethyl (2 MOE)
  modified_base order(23,28,32): mod_base = OTHER; note = 5-methyl cytosine
  modified_base order(21,25,27,30,34): mod_base = OTHER; note = 5-methyl uracil
  modified_base 20: mod_base = OTHER; note = Spacer-9 linker (2-(2-(2-(bis(4-methoxyphenyl)(phenyl)methoxy)ethoxy)ethoxy )ethyl (2-cyanoethyl) diisopropylphosphoramidite)
  source 1..34: mol_type = other RNA
aggtggaaatgaagaaagtatacatatcatacat

SEQ ID NO: 1221 - RNA, 34 nt, synthetic construct
  misc_feature 1..34: note = Synthetic oligonucleotide
  modified_base order(1,2,3,18,19,20,21,22,23,24,25,26,27,28,29,30,31,32,33,34): mod_base = OTHER; note = phosphorothioate (PS) backbone modification
  modified_base order(2,4,6,8,9,10,11,12,14,16,18,20): mod_base = OTHER; note = 2'-fluoro
  modified_base order(1,3,5,7,13,15,17,19): mod_base = OTHER; note = 2'-O-methyl
  modified_base order(21,22,23,24,25,26,27,28,29,30,31,32,33,34): mod_base = OTHER; note = 2'-O-methoxyethyl (2 MOE)
  modified_base 28: mod_base = OTHER; note = 5-methyl cytosine
  modified_base order(21,22,24,26,27,29,31,33,34): mod_base = OTHER; note = 5-methyl uracil
  modified_base 20: mod_base = OTHER; note = Spacer-9 linker (2-(2-(2-(bis(4-methoxyphenyl)(phenyl)methoxy)ethoxy)ethoxy )ethyl (2-cyanoethyl) diisopropylphosphoramidite)
  source 1..34: mol_type = other RNA
aggtggaaatgaagaaagtattatattctatatt

SEQ ID NO: 1222 - RNA, 34 nt, synthetic construct
  misc_feature 1..34: note = Synthetic oligonucleotide
  modified_base order(1,2,3,18,19,20,21,22,23,24,25,26,27,28,29,30,31,32,33,34): mod_base = OTHER; note = phosphorothioate (PS) backbone modification
  modified_base order(2,4,6,8,9,10,11,12,14,16,18,20): mod_base = OTHER; note = 2'-fluoro
  modified_base order(1,3,5,7,13,15,17,19): mod_base = OTHER; note = 2'-O-methyl
  modified_base order(21,22,23,24,25,26,27,28,29,30,31,32,33,34): mod_base = OTHER; note = 2'-O-methoxyethyl (2 MOE)
  modified_base 28: mod_base = OTHER; note = 5-methyl cytosine
  modified_base order(21,22,24,26,27,29,31,33,34): mod_base = OTHER; note = 5-methyl uracil
  modified_base 20: mod_base = OTHER; note = Spacer-9 linker (2-(2-(2-(bis(4-methoxyphenyl)(phenyl)methoxy)ethoxy)ethoxy )ethyl (2-cyanoethyl) diisopropylphosphoramidite)
  source 1..34: mol_type = other RNA
aggtggaaatgaagaaagtattatattctatgtt

SEQ ID NO: 1223 - RNA, 34 nt, synthetic construct
  misc_feature 1..34: note = Synthetic oligonucleotide
  modified_base order(1,2,3,18,19,20,21,22,23,24,25,26,27,28,29,30,31,32,33,34): mod_base = OTHER; note = phosphorothioate (PS) backbone modification
  modified_base order(2,4,6,8,9,10,11,12,14,16,18,20): mod_base = OTHER; note = 2'-fluoro
  modified_base order(1,3,5,7,13,15,17,19): mod_base = OTHER; note = 2'-O-methyl
  modified_base order(21,22,23,24,25,26,27,28,29,30,31,32,33,34): mod_base = OTHER; note = 2'-O-methoxyethyl (2 MOE)
  modified_base 28: mod_base = OTHER; note = 5-methyl cytosine
  modified_base order(21,24,26,27,29,31,33,34): mod_base = OTHER; note = 5-methyl uracil
  modified_base 20: mod_base = OTHER; note = Spacer-9 linker (2-(2-(2-(bis(4-methoxyphenyl)(phenyl)methoxy)ethoxy)ethoxy )ethyl (2-cyanoethyl) diisopropylphosphoramidite)
  source 1..34: mol_type = other RNA
aggtggaaatgaagaaagtatagtattctatgtt

SEQ ID NO: 1224 - RNA, 34 nt, synthetic construct; identical to SEQ ID NO: 1197
  misc_feature 1..34: note = Synthetic oligonucleotide
  modified_base order(1,2,3,18,19,20,21,22,33,34): mod_base = OTHER; note = phosphorothioate (PS) backbone modification
  modified_base order(2,4,6,8,9,10,11,12,14,16,18,20): mod_base = OTHER; note = 2'-fluoro
  modified_base order(1,3,5,7,13,15,17,19): mod_base = OTHER; note = 2'-O-methyl
  modified_base order(21,22,23,24,25,26,27,28,29,30,31,32,33,34): mod_base = OTHER; note = 2'-O-methoxyethyl (2 MOE)
  modified_base 28: mod_base = OTHER; note = 5-methyl cytosine
  modified_base order(21,22,24,26,27,29,31,33,34): mod_base = OTHER; note = 5-methyl uracil
  modified_base 20: mod_base = OTHER; note = Spacer-9 linker (2-(2-(2-(bis(4-methoxyphenyl)(phenyl)methoxy)ethoxy)ethoxy )ethyl (2-cyanoethyl) diisopropylphosphoramidite)
  source 1..34: mol_type = other RNA

SEQ ID NO: 1225 - RNA, 34 nt, synthetic construct; identical to SEQ ID NO: 1197
  misc_feature 1..34: note = Synthetic oligonucleotide
  modified_base order(1,2,3,18,19,20,21,22,23,32,33,34): mod_base = OTHER; note = phosphorothioate (PS) backbone modification
  modified_base order(2,4,6,8,9,10,11,12,14,16,18,20): mod_base = OTHER; note = 2'-fluoro
  modified_base order(1,3,5,7,13,15,17,19): mod_base = OTHER; note = 2'-O-methyl
  modified_base order(21,22,23,24,25,26,27,28,29,30,31,32,33,34): mod_base = OTHER; note = 2'-O-methoxyethyl (2 MOE)
  modified_base 28: mod_base = OTHER; note = 5-methyl cytosine
  modified_base order(21,22,24,26,27,29,31,33,34): mod_base = OTHER; note = 5-methyl uracil
  modified_base 20: mod_base = OTHER; note = Spacer-9 linker (2-(2-(2-(bis(4-methoxyphenyl)(phenyl)methoxy)ethoxy)ethoxy )ethyl (2-cyanoethyl) diisopropylphosphoramidite)
  source 1..34: mol_type = other RNA

SEQ ID NO: 1226 - RNA, 34 nt, synthetic construct; identical to SEQ ID NO: 1197
  misc_feature 1..34: note = Synthetic oligonucleotide
  modified_base order(1,2,3,18,19,20,21,22,23,24,31,32,33,34): mod_base = OTHER; note = phosphorothioate (PS) backbone modification
  modified_base order(2,4,6,8,9,10,11,12,14,16,18,20): mod_base = OTHER; note = 2'-fluoro
  modified_base order(1,3,5,7,13,15,17,19): mod_base = OTHER; note = 2'-O-methyl
  modified_base order(21,22,23,24,25,26,27,28,29,30,31,32,33,34): mod_base = OTHER; note = 2'-O-methoxyethyl (2 MOE)
  modified_base 28: mod_base = OTHER; note = 5-methyl cytosine
  modified_base order(21,22,24,26,27,29,31,33,34): mod_base = OTHER; note = 5-methyl uracil
  modified_base 20: mod_base = OTHER; note = Spacer-9 linker (2-(2-(2-(bis(4-methoxyphenyl)(phenyl)methoxy)ethoxy)ethoxy )ethyl (2-cyanoethyl) diisopropylphosphoramidite)
  source 1..34: mol_type = other RNA

SEQ ID NO: 1227 - RNA, 34 nt, synthetic construct; identical to SEQ ID NO: 1197
  misc_feature 1..34: note = Synthetic oligonucleotide
  modified_base order(1,2,3,18,19,20,21,22,23,24,25,30,31,32,33,34): mod_base = OTHER; note = phosphorothioate (PS) backbone modification
  modified_base order(2,4,6,8,9,10,11,12,14,16,18,20): mod_base = OTHER; note = 2'-fluoro
  modified_base order(1,3,5,7,13,15,17,19): mod_base = OTHER; note = 2'-O-methyl
  modified_base order(21,22,23,24,25,26,27,28,29,30,31,32,33,34): mod_base = OTHER; note = 2'-O-methoxyethyl (2 MOE)
  modified_base 28: mod_base = OTHER; note = 5-methyl cytosine
  modified_base order(21,22,24,26,27,29,31,33,34): mod_base = OTHER; note = 5-methyl uracil
  modified_base 20: mod_base = OTHER; note = Spacer-9 linker (2-(2-(2-(bis(4-methoxyphenyl)(phenyl)methoxy)ethoxy)ethoxy )ethyl (2-cyanoethyl) diisopropylphosphoramidite)
  source 1..34: mol_type = other RNA

SEQ ID NO: 1228 - RNA, 34 nt, synthetic construct; identical to SEQ ID NO: 1197
  misc_feature 1..34: note = Synthetic oligonucleotide
  modified_base order(1,2,3,18,19,20,21,22,23,24,25,26,29,30,31,32,33,34): mod_base = OTHER; note = phosphorothioate (PS) backbone modification
  modified_base order(2,4,6,8,9,10,11,12,14,16,18,20): mod_base = OTHER; note = 2'-fluoro
  modified_base order(1,3,5,7,13,15,17,19): mod_base = OTHER; note = 2'-O-methyl
  modified_base order(21,22,23,24,25,26,27,28,29,30,31,32,33,34): mod_base = OTHER; note = 2'-O-methoxyethyl (2 MOE)
  modified_base 28: mod_base = OTHER; note = 5-methyl cytosine
  modified_base order(21,22,24,26,27,29,31,33,34): mod_base = OTHER; note = 5-methyl uracil
  modified_base 20: mod_base = OTHER; note = Spacer-9 linker (2-(2-(2-(bis(4-methoxyphenyl)(phenyl)methoxy)ethoxy)ethoxy )ethyl (2-cyanoethyl) diisopropylphosphoramidite)
  source 1..34: mol_type = other RNA

SEQ ID NO: 1229 - RNA, 34 nt, synthetic construct; identical to SEQ ID NO: 1197
  misc_feature 1..34: note = Synthetic oligonucleotide
  modified_base order(1,2,3,18,19,20,21,22,23,24,25,26,27,28,29,30,31,32,33,34): mod_base = OTHER; note = phosphorothioate (PS) backbone modification
  modified_base order(2,4,6,8,9,10,11,12,14,16,18,20): mod_base = OTHER; note = 2'-fluoro
  modified_base order(1,3,5,7,13,15,17,19): mod_base = OTHER; note = 2'-O-methyl
  modified_base order(21,22,23,24,25,26,27,28,29,30,31,32,33,34): mod_base = OTHER; note = 2'-O-methoxyethyl (2 MOE)
  modified_base 28: mod_base = OTHER; note = 5-methyl cytosine
  modified_base order(21,22,24,26,27,29,31,33,34): mod_base = OTHER; note = 5-methyl uracil
  modified_base 20: mod_base = OTHER; note = Spacer-9 linker (2-(2-(2-(bis(4-methoxyphenyl)(phenyl)methoxy)ethoxy)ethoxy )ethyl (2-cyanoethyl) diisopropylphosphoramidite)
  source 1..34: mol_type = other RNA

SEQ ID NO: 1230 - RNA, 34 nt, synthetic construct; identical to SEQ ID NO: 1197
  misc_feature 1..34: note = Synthetic oligonucleotide
  modified_base order(1,2,3,18,19,20,21,22,23,24,25,26,27,28,29,30,31,32,33,34): mod_base = OTHER; note = phosphorothioate (PS) backbone modification
  modified_base order(2,4,6,8,9,10,11,12,14,16,18,20): mod_base = OTHER; note = 2'-fluoro
  modified_base order(1,3,5,7,13,15,17,19,27,28): mod_base = OTHER; note = 2'-O-methyl
  modified_base order(21,22,23,24,25,26,29,30,31,32,33,34): mod_base = OTHER; note = 2'-O-methoxyethyl (2 MOE)
  modified_base order(21,22,24,26,29,31,33,34): mod_base = OTHER; note = 5-methyl uracil
  modified_base 20: mod_base = OTHER; note = Spacer-9 linker (2-(2-(2-(bis(4-methoxyphenyl)(phenyl)methoxy)ethoxy)ethoxy )ethyl (2-cyanoethyl) diisopropylphosphoramidite)
  source 1..34: mol_type = other RNA

SEQ ID NO: 1231 - RNA, 34 nt, synthetic construct; identical to SEQ ID NO: 1197
  misc_feature 1..34: note = Synthetic oligonucleotide
  modified_base order(1,2,3,18,19,20,21,22,23,24,25,26,27,28,29,30,31,32,33,34): mod_base = OTHER; note = phosphorothioate (PS) backbone modification
  modified_base order(2,4,6,8,9,10,11,12,14,16,18,20): mod_base = OTHER; note = 2'-fluoro
  modified_base order(1,3,5,7,13,15,17,19,26,27,28,29): mod_base = OTHER; note = 2'-O-methyl
  modified_base order(21,22,23,24,25,30,31,32,33,34): mod_base = OTHER; note = 2'-O-methoxyethyl (2 MOE)
  modified_base order(21,22,24,31,33,34): mod_base = OTHER; note = 5-methyl uracil
  modified_base 20: mod_base = OTHER; note = Spacer-9 linker (2-(2-(2-(bis(4-methoxyphenyl)(phenyl)methoxy)ethoxy)ethoxy )ethyl (2-cyanoethyl) diisopropylphosphoramidite)
  source 1..34: mol_type = other RNA

SEQ ID NO: 1232 - RNA, 34 nt, synthetic construct; identical to SEQ ID NO: 1197
  misc_feature 1..34: note = Synthetic oligonucleotide
  modified_base order(1,2,3,18,19,20,21,22,23,24,25,26,27,28,29,30,31,32,33,34): mod_base = OTHER; note = phosphorothioate (PS) backbone modification
  modified_base order(2,4,6,8,9,10,11,12,14,16,18,20): mod_base = OTHER; note = 2'-fluoro
  modified_base order(1,3,5,7,13,15,17,19,25,26,27,28,29,30): mod_base = OTHER; note = 2'-O-methyl
  modified_base order(21,22,23,24,31,32,33,34): mod_base = OTHER; note = 2'-O-methoxyethyl (2 MOE)
  modified_base order(21,22,24,31,33,34): mod_base = OTHER; note = 5-methyl uracil
  modified_base 20: mod_base = OTHER; note = Spacer-9 linker (2-(2-(2-(bis(4-methoxyphenyl)(phenyl)methoxy)ethoxy)ethoxy )ethyl (2-cyanoethyl) diisopropylphosphoramidite)
  source 1..34: mol_type = other RNA

SEQ ID NO: 1233 - RNA, 34 nt, synthetic construct; identical to SEQ ID NO: 1197
  misc_feature 1..34: note = Synthetic oligonucleotide
  modified_base order(1,2,3,18,19,20,21,22,23,24,25,26,27,28,29,30,31,32,33,34): mod_base = OTHER; note = phosphorothioate (PS) backbone modification
  modified_base order(2,4,6,8,9,10,11,12,14,16,18,20): mod_base = OTHER; note = 2'-fluoro
  modified_base order(1,3,5,7,13,15,17,19,24,25,26,27,28,29,30,31): mod_base = OTHER; note = 2'-O-methyl
  modified_base order(21,22,23,32,33,34): mod_base = OTHER; note = 2'-O-methoxyethyl (2 MOE)
  modified_base order(21,22,33,34): mod_base = OTHER; note = 5-methyl uracil
  modified_base 20: mod_base = OTHER; note = Spacer-9 linker (2-(2-(2-(bis(4-methoxyphenyl)(phenyl)methoxy)ethoxy)ethoxy )ethyl (2-cyanoethyl) diisopropylphosphoramidite)
  source 1..34: mol_type = other RNA

SEQ ID NO: 1234 - RNA, 34 nt, synthetic construct; identical to SEQ ID NO: 1197
  misc_feature 1..34: note = Synthetic oligonucleotide
  modified_base order(1,2,3,18,19,20,21,22,23,24,25,26,27,28,29,30,31,32,33,34): mod_base = OTHER; note = phosphorothioate (PS) backbone modification
  modified_base order(2,4,6,8,9,10,11,12,14,16,18,20): mod_base = OTHER; note = 2'-fluoro
  modified_base order(1,3,5,7,13,15,17,19,23,24,25,26,27,28,29,30,31,32): mod_base = OTHER; note = 2'-O-methyl
  modified_base order(21,22,33,34): mod_base = OTHER; note = 2'-O-methoxyethyl (2 MOE)
  modified_base order(21,22,33,34): mod_base = OTHER; note = 5-methyl uracil
  modified_base 20: mod_base = OTHER; note = Spacer-9 linker (2-(2-(2-(bis(4-methoxyphenyl)(phenyl)methoxy)ethoxy)ethoxy )ethyl (2-cyanoethyl) diisopropylphosphoramidite)
  source 1..34: mol_type = other RNA

SEQ ID NO: 1235 - RNA, 34 nt, synthetic construct; identical to SEQ ID NO: 1197
  misc_feature 1..34: note = Synthetic oligonucleotide
  modified_base order(1,2,3,18,19,20,21,22,23,24,25,26,27,28,29,30,31,32,33,34): mod_base = OTHER; note = phosphorothioate (PS) backbone modification
  modified_base order(2,4,6,8,9,10,11,12,14,16,18,20): mod_base = OTHER; note = 2'-fluoro
  modified_base order(1,3,5,7,13,15,17,19,22,23,24,25,26,27,28,29,30,31,32,33): mod_base = OTHER; note = 2'-O-methyl
  modified_base order(21,34): mod_base = OTHER; note = 2'-O-methoxyethyl (2 MOE)
  modified_base order(21,34): mod_base = OTHER; note = 5-methyl uracil
  modified_base 20: mod_base = OTHER; note = Spacer-9 linker (2-(2-(2-(bis(4-methoxyphenyl)(phenyl)methoxy)ethoxy)ethoxy )ethyl (2-cyanoethyl) diisopropylphosphoramidite)
  source 1..34: mol_type = other RNA

SEQ ID NO: 1236 - RNA, 34 nt, synthetic construct; identical to SEQ ID NO: 1197
  misc_feature 1..34: note = Synthetic oligonucleotide
  modified_base order(1,2,3,18,19,20,21,22,23,24,25,26,27,28,29,30,31,32,33,34): mod_base = OTHER; note = phosphorothioate (PS) backbone modification
  modified_base order(2,4,6,8,9,10,11,12,14,16,18,20): mod_base = OTHER; note = 2'-fluoro
  modified_base order(1,3,5,7,13,15,17,19,21,22,23,24,25,26,27,28,29,30,31,32,33,34): mod_base = OTHER; note = 2'-O-methyl
  modified_base 20: mod_base = OTHER; note = Spacer-9 linker (2-(2-(2-(bis(4-methoxyphenyl)(phenyl)methoxy)ethoxy)ethoxy )ethyl (2-cyanoethyl) diisopropylphosphoramidite)
  source 1..34: mol_type = other RNA

SEQ ID NO: 1237 - RNA, 33 nt, synthetic construct
  misc_feature 1..33: note = Synthetic oligonucleotide
  modified_base order(1,2,3,18,19,20,21,22,23,24,25,26,27,28,29,30,31,32,33): mod_base = OTHER; note = phosphorothioate (PS) backbone modification
  modified_base order(2,4,6,8,9,10,11,12,14,16,18,20): mod_base = OTHER; note = 2'-fluoro
  modified_base order(1,3,5,7,13,15,17,19): mod_base = OTHER; note = 2'-O-methyl
  modified_base order(21,22,23,24,25,26,27,28,29,30,31,32,33): mod_base = OTHER; note = 2'-O-methoxyethyl (2 MOE)
  modified_base 28: mod_base = OTHER; note = 5-methyl cytosine
  modified_base order(21,22,24,26,27,29,31,33): mod_base = OTHER; note = 5-methyl uracil
  modified_base 20: mod_base = OTHER; note = Spacer-9 linker (2-(2-(2-(bis(4-methoxyphenyl)(phenyl)methoxy)ethoxy)ethoxy )ethyl (2-cyanoethyl) diisopropylphosphoramidite)
  source 1..33: mol_type = other RNA
aggtggaaatgaagaaagtattgtattctatgt

SEQ ID NO: 1238 - RNA, 32 nt, synthetic construct
  misc_feature 1..32: note = Synthetic oligonucleotide
  modified_base order(1,2,3,18,19,20,21,22,23,24,25,26,27,28,29,30,31,32): mod_base = OTHER; note = phosphorothioate (PS) backbone modification
  modified_base order(2,4,6,8,9,10,11,12,14,16,18,20): mod_base = OTHER; note = 2'-fluoro
  modified_base order(1,3,5,7,13,15,17,19): mod_base = OTHER; note = 2'-O-methyl
  modified_base order(21,22,23,24,25,26,27,28,29,30,31,32): mod_base = OTHER; note = 2'-O-methoxyethyl (2 MOE)
  modified_base 28: mod_base = OTHER; note = 5-methyl cytosine
  modified_base order(21,22,24,26,27,29,31): mod_base = OTHER; note = 5-methyl uracil
  modified_base 20: mod_base = OTHER; note = Spacer-9 linker (2-(2-(2-(bis(4-methoxyphenyl)(phenyl)methoxy)ethoxy)ethoxy )ethyl (2-cyanoethyl) diisopropylphosphoramidite)
  source 1..32: mol_type = other RNA
aggtggaaatgaagaaagtattgtattctatg

SEQ ID NO: 1239 - RNA, 31 nt, synthetic construct; identical to SEQ ID NO: 1216
  misc_feature 1..31: note = Synthetic oligonucleotide
  modified_base order(1,2,3,18,19,20,21,22,23,24,25,26,27,28,29,30,31): mod_base = OTHER; note = phosphorothioate (PS) backbone modification
  modified_base order(2,4,6,8,9,10,11,12,14,16,18,20): mod_base = OTHER; note = 2'-fluoro
  modified_base order(1,3,5,7,13,15,17,19): mod_base = OTHER; note = 2'-O-methyl
  modified_base order(21,22,23,24,25,26,27,28,29,30,31): mod_base = OTHER; note = 2'-O-methoxyethyl (2 MOE)
  modified_base 28: mod_base = OTHER; note = 5-methyl cytosine
  modified_base order(21,22,24,26,27,29,31): mod_base = OTHER; note = 5-methyl uracil
  modified_base 20: mod_base = OTHER; note = Spacer-9 linker (2-(2-(2-(bis(4-methoxyphenyl)(phenyl)methoxy)ethoxy)ethoxy )ethyl (2-cyanoethyl) diisopropylphosphoramidite)
  source 1..31: mol_type = other RNA

SEQ ID NO: 1240 - RNA, 30 nt, synthetic construct
  misc_feature 1..30: note = Synthetic oligonucleotide
  modified_base order(1,2,3,18,19,20,21,22,23,24,25,26,27,28,29,30): mod_base = OTHER; note = phosphorothioate (PS) backbone modification
  modified_base order(2,4,6,8,9,10,11,12,14,16,18,20): mod_base = OTHER; note = 2'-fluoro
  modified_base order(1,3,5,7,13,15,17,19): mod_base = OTHER; note = 2'-O-methyl
  modified_base order(21,22,23,24,25,26,27,28,29,30): mod_base = OTHER; note = 2'-O-methoxyethyl (2 MOE)
  modified_base 28: mod_base = OTHER; note = 5-methyl cytosine
  modified_base order(21,22,24,26,27,29): mod_base = OTHER; note = 5-methyl uracil
  modified_base 20: mod_base = OTHER; note = Spacer-9 linker (2-(2-(2-(bis(4-methoxyphenyl)(phenyl)methoxy)ethoxy)ethoxy )ethyl (2-cyanoethyl) diisopropylphosphoramidite)
  source 1..30: mol_type = other RNA
aggtggaaatgaagaaagtattgtattcta

SEQ ID NO: 1241 - RNA, 29 nt, synthetic construct
  misc_feature 1..29: note = Synthetic oligonucleotide
  modified_base order(1,2,3,18,19,20,21,22,23,24,25,26,27,28,29): mod_base = OTHER; note = phosphorothioate (PS) backbone modification
  modified_base order(2,4,6,8,9,10,11,12,14,16,18,20): mod_base = OTHER; note = 2'-fluoro
  modified_base order(1,3,5,7,13,15,17,19): mod_base = OTHER; note = 2'-O-methyl
  modified_base order(21,22,23,24,25,26,27,28,29): mod_base = OTHER; note = 2'-O-methoxyethyl (2 MOE)
  modified_base 28: mod_base = OTHER; note = 5-methyl cytosine
  modified_base order(21,22,24,26,27,29): mod_base = OTHER; note = 5-methyl uracil
  modified_base 20: mod_base = OTHER; note = Spacer-9 linker (2-(2-(2-(bis(4-methoxyphenyl)(phenyl)methoxy)ethoxy)ethoxy )ethyl (2-cyanoethyl) diisopropylphosphoramidite)
  source 1..29: mol_type = other RNA
aggtggaaatgaagaaagtattgtattct

SEQ ID NO: 1242 - RNA, 28 nt, synthetic construct
  misc_feature 1..28: note = Synthetic oligonucleotide
  modified_base order(1,2,3,18,19,20,21,22,23,24,25,26,27,28): mod_base = OTHER; note = phosphorothioate (PS) backbone modification
  modified_base order(2,4,6,8,9,10,11,12,14,16,18,20): mod_base = OTHER; note = 2'-fluoro
  modified_base order(1,3,5,7,13,15,17,19): mod_base = OTHER; note = 2'-O-methyl
  modified_base order(21,22,23,24,25,26,27,28): mod_base = OTHER; note = 2'-O-methoxyethyl (2 MOE)
  modified_base 28: mod_base = OTHER; note = 5-methyl cytosine
  modified_base order(21,22,24,26,27): mod_base = OTHER; note = 5-methyl uracil
  modified_base 20: mod_base = OTHER; note = Spacer-9 linker (2-(2-(2-(bis(4-methoxyphenyl)(phenyl)methoxy)ethoxy)ethoxy )ethyl (2-cyanoethyl) diisopropylphosphoramidite)
  source 1..28: mol_type = other RNA
aggtggaaatgaagaaagtattgtattc

SEQ ID NO: 1243 - RNA, 27 nt, synthetic construct
  misc_feature 1..27: note = Synthetic oligonucleotide
  modified_base order(1,2,3,18,19,20,21,22,23,24,25,26,27): mod_base = OTHER; note = phosphorothioate (PS) backbone modification
  modified_base order(2,4,6,8,9,10,11,12,14,16,18,20): mod_base = OTHER; note = 2'-fluoro
  modified_base order(1,3,5,7,13,15,17,19): mod_base = OTHER; note = 2'-O-methyl
  modified_base order(21,22,23,24,25,26,27): mod_base = OTHER; note = 2'-O-methoxyethyl (2 MOE)
  modified_base order(21,22,24,26,27): mod_base = OTHER; note = 5-methyl uracil
  modified_base 20: mod_base = OTHER; note = Spacer-9 linker (2-(2-(2-(bis(4-methoxyphenyl)(phenyl)methoxy)ethoxy)ethoxy )ethyl (2-cyanoethyl) diisopropylphosphoramidite)
  source 1..27: mol_type = other RNA
aggtggaaatgaagaaagtattgtatt

SEQ ID NO: 1244 - RNA, 26 nt, synthetic construct
  misc_feature 1..26: note = Synthetic oligonucleotide
  modified_base order(1,2,3,18,19,20,21,22,23,24,25,26): mod_base = OTHER; note = phosphorothioate (PS) backbone modification
  modified_base order(2,4,6,8,9,10,11,12,14,16,18,20): mod_base = OTHER; note = 2'-fluoro
  modified_base order(1,3,5,7,13,15,17,19): mod_base = OTHER; note = 2'-O-methyl
  modified_base order(21,22,23,24,25,26): mod_base = OTHER; note = 2'-O-methoxyethyl (2 MOE)
  modified_base order(21,22,24,26): mod_base = OTHER; note = 5-methyl uracil
  modified_base 20: mod_base = OTHER; note = Spacer-9 linker (2-(2-(2-(bis(4-methoxyphenyl)(phenyl)methoxy)ethoxy)ethoxy )ethyl (2-cyanoethyl) diisopropylphosphoramidite)
  source 1..26: mol_type = other RNA
aggtggaaatgaagaaagtattgtat

SEQ ID NO: 1245 - RNA, 34 nt, synthetic construct
  misc_feature 1..34: note = Synthetic oligonucleotide
  modified_base order(1,2,3,18,19,20,21,22,23,24,25,26,27,28,29,30,31,32,33,34): mod_base = OTHER; note = phosphorothioate (PS) backbone modification
  modified_base order(2,4,6,8,9,10,11,12,14,16,18,20): mod_base = OTHER; note = 2'-fluoro
  modified_base order(1,3,5,7,13,15,17,19): mod_base = OTHER; note = 2'-O-methyl
  modified_base order(21,22,23,24,25,26,27,28,29,30,31,32,33,34): mod_base = OTHER; note = 2'-O-methoxyethyl (2 MOE)
  modified_base order(21,29,30,31,34): mod_base = OTHER; note = 5-methyl cytosine
  modified_base 27: mod_base = OTHER; note = 5-methyl uracil
  modified_base 20: mod_base = OTHER; note = Spacer-9 linker (2-(2-(2-(bis(4-methoxyphenyl)(phenyl)methoxy)ethoxy)ethoxy )ethyl (2-cyanoethyl) diisopropylphosphoramidite)
  source 1..34: mol_type = other RNA
aggtggaaatgaagaaagtacggaagtacccaac

SEQ ID NO: 1246 - RNA, 34 nt, synthetic construct
  misc_feature 1..34: note = Synthetic oligonucleotide
  modified_base order(1,2,3,18,19,20,21,22,23,24,25,26,27,28,29,30,31,32,33,34): mod_base = OTHER; note = phosphorothioate (PS) backbone modification
  modified_base order(2,4,6,8,9,10,11,12,14,16,18,20): mod_base = OTHER; note = 2'-fluoro
  modified_base order(1,3,5,7,13,15,17,19): mod_base = OTHER; note = 2'-O-methyl
  modified_base order(21,22,23,24,25,26,27,28,29,30,31,32,33,34): mod_base = OTHER; note = 2'-O-methoxyethyl (2 MOE)
  modified_base order(26,29): mod_base = OTHER; note = 5-methyl cytosine
  modified_base order(23,27,31,33): mod_base = OTHER; note = 5-methyl uracil
  modified_base 20: mod_base = OTHER; note = Spacer-9 linker (2-(2-(2-(bis(4-methoxyphenyl)(phenyl)methoxy)ethoxy)ethoxy )ethyl (2-cyanoethyl) diisopropylphosphoramidite)
  source 1..34: mol_type = other RNA
aggtggaaatgaagaaagtaaataactacgtgta

SEQ ID NO: 1247 - RNA, 34 nt, synthetic construct
  misc_feature 1..34: note = Synthetic oligonucleotide
  modified_base order(1,2,3,18,19,20,21,22,23,24,25,26,27,28,29,30,31,32,33,34): mod_base = OTHER; note = phosphorothioate (PS) backbone modification
  modified_base order(2,4,6,8,9,10,11,12,14,16,18,20): mod_base = OTHER; note = 2'-fluoro
  modified_base order(1,3,5,7,13,15,17,19): mod_base = OTHER; note = 2'-O-methyl
  modified_base order(21,22,23,24,25,26,27,28,29,30,31,32,33,34): mod_base = OTHER; note = 2'-O-methoxyethyl (2 MOE)
  modified_base order(25,30,31): mod_base = OTHER; note = 5-methyl cytosine
  modified_base order(23,32): mod_base = OTHER; note = 5-methyl uracil
  modified_base 20: mod_base = OTHER; note = Spacer-9 linker (2-(2-(2-(bis(4-methoxyphenyl)(phenyl)methoxy)ethoxy)ethoxy )ethyl (2-cyanoethyl) diisopropylphosphoramidite)
  source 1..34: mol_type = other RNA
aggtggaaatgaagaaagtaaatacgaaacctga

SEQ ID NO: 1248 - RNA, 34 nt, synthetic construct
  misc_feature 1..34: note = Synthetic oligonucleotide
  modified_base order(1,2,3,18,19,20,21,22,23,24,25,26,27,28,29,30,31,32,33,34): mod_base = OTHER; note = phosphorothioate (PS) backbone modification
  modified_base order(2,4,6,8,9,10,11,12,14,16,18,20): mod_base = OTHER; note = 2'-fluoro
  modified_base order(1,3,5,7,13,15,17,19): mod_base = OTHER; note = 2'-O-methyl
  modified_base order(21,22,23,24,25,26,27,28,29,30,31,32,33,34): mod_base = OTHER; note = 2'-O-methoxyethyl (2 MOE)
  modified_base order(22,25,28): mod_base = OTHER; note = 5-methyl cytosine
  modified_base order(27,32): mod_base = OTHER; note = 5-methyl uracil
  modified_base 20: mod_base = OTHER; note = Spacer-9 linker (2-(2-(2-(bis(4-methoxyphenyl)(phenyl)methoxy)ethoxy)ethoxy )ethyl (2-cyanoethyl) diisopropylphosphoramidite)
  source 1..34: mol_type = other RNA
aggtggaaatgaagaaagtaacgacatcaaataa

SEQ ID NO: 1249 - RNA, 34 nt, synthetic construct
  misc_feature 1..34: note = Synthetic oligonucleotide
  modified_base order(1,2,3,18,19,20,21,22,23,24,25,26,27,28,29,30,31,32,33,34): mod_base = OTHER; note = phosphorothioate (PS) backbone modification
  modified_base order(2,4,6,8,9,10,11,12,14,16,18,20): mod_base = OTHER; note = 2'-fluoro
  modified_base order(1,3,5,7,13,15,17,19): mod_base = OTHER; note = 2'-O-methyl
  modified_base order(21,22,23,24,25,26,27,28,29,30,31,32,33,34): mod_base = OTHER; note = 2'-O-methoxyethyl (2 MOE)
  modified_base 33: mod_base = OTHER; note = 5-methyl cytosine
  modified_base order(24,27): mod_base = OTHER; note = 5-methyl uracil
  modified_base 20: mod_base = OTHER; note = Spacer-9 linker (2-(2-(2-(bis(4-methoxyphenyl)(phenyl)methoxy)ethoxy)ethoxy )ethyl (2-cyanoethyl) diisopropylphosphoramidite)
  source 1..34: mol_type = other RNA
aggtggaaatgaagaaagtaaaataataagaacg

SEQ ID NO: 1250 - RNA, 34 nt, synthetic construct
  misc_feature 1..34: note = Synthetic oligonucleotide
  modified_base order(1,2,3,18,19,20,21,22,23,24,25,26,27,28,29,30,31,32,33,34): mod_base = OTHER; note = phosphorothioate (PS) backbone modification
  modified_base order(2,4,6,8,9,10,11,12,14,16,18,20): mod_base = OTHER; note = 2'-fluoro
  modified_base order(1,3,5,7,13,15,17,19): mod_base = OTHER; note = 2'-O-methyl
  modified_base order(21,22,23,24,25,26,27,28,29,30,31,32,33,34): mod_base = OTHER; note = 2'-O-methoxyethyl (2 MOE)
  modified_base order(21,22,25,26,29): mod_base = OTHER; note = 5-methyl cytosine
  modified_base order(28,33,34): mod_base = OTHER; note = 5-methyl uracil
  modified_base 20: mod_base = OTHER; note = Spacer-9 linker (2-(2-(2-(bis(4-methoxyphenyl)(phenyl)methoxy)ethoxy)ethoxy )ethyl (2-cyanoethyl) diisopropylphosphoramidite)
  source 1..34: mol_type = other RNA
aggtggaaatgaagaaagtaccaaccatcggatt

SEQ ID NO: 1251 - RNA, 34 nt, synthetic construct
  misc_feature 1..34: note = Synthetic oligonucleotide
  modified_base order(1,2,3,18,19,20,21,22,23,24,25,26,27,28,29,30,31,32,33,34): mod_base = OTHER; note = phosphorothioate (PS) backbone modification
  modified_base order(2,4,6,8,9,10,11,12,14,16,18,20): mod_base = OTHER; note = 2'-fluoro
  modified_base order(1,3,5,7,13,15,17,19): mod_base = OTHER; note = 2'-O-methyl
  modified_base order(21,22,23,24,25,26,27,28,29,30,31,32,33,34): mod_base = OTHER; note = 2'-O-methoxyethyl (2 MOE)
  modified_base order(21,24,25,26,28,34): mod_base = OTHER; note = 5-methyl cytosine
  modified_base order(23,27): mod_base = OTHER; note = 5-methyl uracil
  modified_base 20: mod_base = OTHER; note = Spacer-9 linker (2-(2-(2-(bis(4-methoxyphenyl)(phenyl)methoxy)ethoxy)ethoxy )ethyl (2-cyanoethyl) diisopropylphosphoramidite)
  source 1..34: mol_type = other RNA
aggtggaaatgaagaaagtacgtccctcggggac

SEQ ID NO: 1252 - RNA, 34 nt, synthetic construct
  misc_feature 1..34: note = Synthetic oligonucleotide
  modified_base order(1,2,3,18,19,20,21,22,23,24,25,26,27,28,29,30,31,32,33,34): mod_base = OTHER; note = phosphorothioate (PS) backbone modification
  modified_base order(2,4,6,8,9,10,11,12,14,16,18,20): mod_base = OTHER; note = 2'-fluoro
  modified_base order(1,3,5,7,13,15,17,19): mod_base = OTHER; note = 2'-O-methyl
  modified_base order(21,22,23,24,25,26,27,28,29,30,31,32,33,34): mod_base = OTHER; note = 2'-O-methoxyethyl (2 MOE)
  modified_base order(21,22,26,27,29,32,34): mod_base = OTHER; note = 5-methyl cytosine
  modified_base 33: mod_base = OTHER; note = 5-methyl uracil
  modified_base 20: mod_base = OTHER; note = Spacer-9 linker (2-(2-(2-(bis(4-methoxyphenyl)(phenyl)methoxy)ethoxy)ethoxy )ethyl (2-cyanoethyl) diisopropylphosphoramidite)
  source 1..34: mol_type = other RNA
aggtggaaatgaagaaagtaccaaaccgcagctc

SEQ ID NO: 1253 - RNA, 34 nt, synthetic construct
  misc_feature 1..34: note = Synthetic oligonucleotide
  modified_base order(1,2,3,18,19,20,21,22,23,24,25,26,27,28,29,30,31,32,33,34): mod_base = OTHER; note = phosphorothioate (PS) backbone modification
  modified_base order(2,4,6,8,9,10,11,12,14,16,18,20): mod_base = OTHER; note = 2'-fluoro
  modified_base order(1,3,5,7,13,15,17,19): mod_base = OTHER; note = 2'-O-methyl
  modified_base order(21,22,23,24,25,26,27,28,29,30,31,32,33,34): mod_base = OTHER; note = 2'-O-methoxyethyl (2 MOE)
  modified_base order(21,23,24,26,27,28,30,34): mod_base = OTHER; note = 5-methyl cytosine
  modified_base order(29,31): mod_base = OTHER; note = 5-methyl uracil
  modified_base 20: mod_base = OTHER; note = Spacer-9 linker (2-(2-(2-(bis(4-methoxyphenyl)(phenyl)methoxy)ethoxy)ethoxy )ethyl (2-cyanoethyl) diisopropylphosphoramidite)
  source 1..34: mol_type = other RNA
aggtggaaatgaagaaagtacgccaccctctggc

SEQ ID NO: 1254 - RNA, 34 nt, synthetic construct
  misc_feature 1..34: note = Synthetic oligonucleotide
  modified_base order(1,2,3,18,19,20,21,22,23,24,25,26,27,28,29,30,31,32,33,34): mod_base = OTHER; note = phosphorothioate (PS) backbone modification
  modified_base order(2,4,6,8,9,10,11,12,14,16,18,20): mod_base = OTHER; note = 2'-fluoro
  modified_base order(1,3,5,7,13,15,17,19): mod_base = OTHER; note = 2'-O-methyl
  modified_base order(21,22,23,24,25,26,27,28,29,30,31,32,33,34): mod_base = OTHER; note = 2'-O-methoxyethyl (2 MOE)
  modified_base order(21,23,24,25,26,27,28,30,33): mod_base = OTHER; note = 5-methyl cytosine
  modified_base 32: mod_base = OTHER; note = 5-methyl uracil
  modified_base 20: mod_base = OTHER; note = Spacer-9 linker (2-(2-(2-(bis(4-methoxyphenyl)(phenyl)methoxy)ethoxy)ethoxy )ethyl (2-cyanoethyl) diisopropylphosphoramidite)
  source 1..34: mol_type = other RNA
aggtggaaatgaagaaagtacaccccccacatcg

SEQ ID NO: 1255 - RNA, 34 nt, synthetic construct
  misc_feature 1..34: note = Synthetic oligonucleotide
  modified_base order(1,2,3,18,19,20,21,22,23,24,25,26,27,28,29,30,31,32,33,34): mod_base = OTHER; note = phosphorothioate (PS) backbone modification
  modified_base order(2,4,6,8,9,10,11,12,14,16,18,20): mod_base = OTHER; note = 2'-fluoro
  modified_base order(1,3,5,7,13,15,17,19): mod_base = OTHER; note = 2'-O-methyl
  modified_base order(21,22,23,24,25,26,27,28,29,30,31,32,33,34): mod_base = OTHER; note = 2'-O-methoxyethyl (2 MOE)
  modified_base order(21,22,24,26,27,28,29,30,31,34): mod_base = OTHER; note = 5-methyl cytosine
  modified_base order(25,32): mod_base = OTHER; note = 5-methyl uracil
  modified_base 20: mod_base = OTHER; note = Spacer-9 linker (2-(2-(2-(bis(4-methoxyphenyl)(phenyl)methoxy)ethoxy)ethoxy )ethyl (2-cyanoethyl) diisopropylphosphoramidite)
  source 1..34: mol_type = other RNA
aggtggaaatgaagaaagtaccgctcccccctac

SEQ ID NO: 1256 - RNA, 34 nt, synthetic construct
  misc_feature 1..34: note = Synthetic oligonucleotide
  modified_base order(1,2,3,18,19,20,21,22,23,24,25,26,27,28,29,30,31,32,33,34): mod_base = OTHER; note = phosphorothioate (PS) backbone modification
  modified_base order(2,4,6,8,9,10,11,12,14,16,18,20): mod_base = OTHER; note = 2'-fluoro
  modified_base order(1,3,5,7,13,15,17,19): mod_base = OTHER; note = 2'-O-methyl
  modified_base order(21,22,23,24,25,26,27,28,29,30,31,32,33,34): mod_base = OTHER; note = 2'-O-methoxyethyl (2 MOE)
  modified_base order(23,25,33): mod_base = OTHER; note = 5-methyl cytosine
  modified_base order(31,32): mod_base = OTHER; note = 5-methyl uracil
  modified_base 20: mod_base = OTHER; note = Spacer-9 linker (2-(2-(2-(bis(4-methoxyphenyl)(phenyl)methoxy)ethoxy)ethoxy )ethyl (2-cyanoethyl) diisopropylphosphoramidite)
  source 1..34: mol_type = other RNA
aggtggaaatgaagaaagtaggcacaaggattcg

SEQ ID NO: 1257 - RNA, 34 nt, synthetic construct
  misc_feature 1..34: note = Synthetic oligonucleotide
  modified_base order(1,2,3,18,19,20,21,22,23,24,25,26,27,28,29,30,31,32,33,34): mod_base = OTHER; note = phosphorothioate (PS) backbone modification
  modified_base order(2,4,6,8,9,10,11,12,14,16,18,20): mod_base = OTHER; note = 2'-fluoro
  modified_base order(1,3,5,7,13,15,17,19): mod_base = OTHER; note = 2'-O-methyl
  modified_base order(21,22,23,24,25,26,27,28,29,30,31,32,33,34): mod_base = OTHER; note = 2'-O-methoxyethyl (2 MOE)
  modified_base order(31,32): mod_base = OTHER; note = 5-methyl cytosine
  modified_base order(23,25,33): mod_base = OTHER; note = 5-methyl uracil
  modified_base 20: mod_base = OTHER; note = Spacer-9 linker (2-(2-(2-(bis(4-methoxyphenyl)(phenyl)methoxy)ethoxy)ethoxy )ethyl (2-cyanoethyl) diisopropylphosphoramidite)
  source 1..34: mol_type = other RNA
aggtggaaatgaagaaagtaggtgtggaagccta

SEQ ID NO: 1258 - RNA, 34 nt, synthetic construct
  misc_feature 1..34: note = Synthetic oligonucleotide
  modified_base order(1,2,3,18,19,20,21,22,23,24,25,26,27,28,29,30,31,32,33,34): mod_base = OTHER; note = phosphorothioate (PS) backbone modification
  modified_base order(2,4,6,8,9,10,11,12,14,16,18,20): mod_base = OTHER; note = 2'-fluoro
  modified_base order(1,3,5,7,13,15,17,19): mod_base = OTHER; note = 2'-O-methyl
  modified_base order(21,22,23,24,25,26,27,28,29,30,31,32,33,34): mod_base = OTHER; note = 2'-O-methoxyethyl (2 MOE)
  modified_base order(26,34): mod_base = OTHER; note = 5-methyl cytosine
  modified_base order(24,25,30): mod_base = OTHER; note = 5-methyl uracil
  modified_base 20: mod_base = OTHER; note = Spacer-9 linker (2-(2-(2-(bis(4-methoxyphenyl)(phenyl)methoxy)ethoxy)ethoxy )ethyl (2-cyanoethyl) diisopropylphosphoramidite)
  source 1..34: mol_type = other RNA
aggtggaaatgaagaaagtagagttcggatgggc

SEQ ID NO: 1259 - RNA, 34 nt, synthetic construct
  misc_feature 1..34: note = Synthetic oligonucleotide
  modified_base order(1,2,3,18,19,20,21,22,23,24,25,26,27,28,29,30,31,32,33,34): mod_base = OTHER; note = phosphorothioate (PS) backbone modification
  modified_base order(2,4,6,8,9,10,11,12,14,16,18,20): mod_base = OTHER; note = 2'-fluoro
  modified_base order(1,3,5,7,13,15,17,19): mod_base = OTHER; note = 2'-O-methyl
  modified_base order(21,22,23,24,25,26,27,28,29,30,31,32,33,34): mod_base = OTHER; note = 2'-O-methoxyethyl (2 MOE)
  modified_base order(24,31,33,34): mod_base = OTHER; note = 5-methyl cytosine
  modified_base 29: mod_base = OTHER; note = 5-methyl uracil
  modified_base 20: mod_base = OTHER; note = Spacer-9 linker (2-(2-(2-(bis(4-methoxyphenyl)(phenyl)methoxy)ethoxy)ethoxy )ethyl (2-cyanoethyl) diisopropylphosphoramidite)
  source 1..34: mol_type = other RNA
aggtggaaatgaagaaagtagagcggggtgcgcc

SEQ ID NO: 1260 - RNA, 34 nt, synthetic construct
  misc_feature 1..34: note = Synthetic oligonucleotide
  modified_base order(1,2,3,18,19,20,21,22,23,24,25,26,27,28,29,30,31,32,33,34): mod_base = OTHER; note = phosphorothioate (PS) backbone modification
  modified_base order(2,4,6,8,9,10,11,12,14,16,18,20): mod_base = OTHER; note = 2'-fluoro
  modified_base order(1,3,5,7,13,15,17,19): mod_base = OTHER; note = 2'-O-methyl
  modified_base order(21,22,23,24,25,26,27,28,29,30,31,32,33,34): mod_base = OTHER; note = 2'-O-methoxyethyl (2 MOE)
  modified_base order(27,30): mod_base = OTHER; note = 5-methyl cytosine
  modified_base order(23,29,33): mod_base = OTHER; note = 5-methyl uracil
  modified_base 20: mod_base = OTHER; note = Spacer-9 linker (2-(2-(2-(bis(4-methoxyphenyl)(phenyl)methoxy)ethoxy)ethoxy )ethyl (2-cyanoethyl) diisopropylphosphoramidite)
  source 1..34: mol_type = other RNA
aggtggaaatgaagaaagtaggtgggcgtcggtg

SEQ ID NO: 1261 - RNA, 34 nt, synthetic construct
  misc_feature 1..34: note = Synthetic oligonucleotide
  modified_base order(1,2,3,18,19,20,21,22,23,24,25,26,27,28,29,30,31,32,33,34): mod_base = OTHER; note = phosphorothioate (PS) backbone modification
  modified_base order(2,4,6,8,9,10,11,12,14,16,18,20): mod_base = OTHER; note = 2'-fluoro
  modified_base order(1,3,5,7,13,15,17,19): mod_base = OTHER; note = 2'-O-methyl
  modified_base order(21,22,23,24,25,26,27,28,29,30,31,32,33,34): mod_base = OTHER; note = 2'-O-methoxyethyl (2 MOE)
  modified_base order(30,32): mod_base = OTHER; note = 5-methyl cytosine
  modified_base order(21,25,29,31,34): mod_base = OTHER; note = 5-methyl uracil
  modified_base 20: mod_base = OTHER; note = Spacer-9 linker (2-(2-(2-(bis(4-methoxyphenyl)(phenyl)methoxy)ethoxy)ethoxy )ethyl (2-cyanoethyl) diisopropylphosphoramidite)
  source 1..34: mol_type = other RNA
aggtggaaatgaagaaagtatgggtaggtctcgt

SEQ ID NO: 1262 - RNA, 34 nt, synthetic construct
  misc_feature 1..34: note = Synthetic oligonucleotide
  modified_base order(1,2,3,18,19,20,21,22,23,24,25,26,27,28,29,30,31,32,33,34): mod_base = OTHER; note = phosphorothioate (PS) backbone modification
  modified_base order(2,4,6,8,9,10,11,12,14,16,18,20): mod_base = OTHER; note = 2'-fluoro
  modified_base order(1,3,5,7,13,15,17,19): mod_base = OTHER; note = 2'-O-methyl
  modified_base order(21,22,23,24,25,26,27,28,29,30,31,32,33,34): mod_base = OTHER; note = 2'-O-methoxyethyl (2 MOE)
  modified_base order(25,26,30,32): mod_base = OTHER; note = 5-methyl cytosine
  modified_base order(21,22,24,28,29,33): mod_base = OTHER; note = 5-methyl uracil
  modified_base 20: mod_base = OTHER; note = Spacer-9 linker (2-(2-(2-(bis(4-methoxyphenyl)(phenyl)methoxy)ethoxy)ethoxy )ethyl (2-cyanoethyl) diisopropylphosphoramidite)
  source 1..34: mol_type = other RNA
aggtggaaatgaagaaagtattgtccgttcgcta

SEQ ID NO: 1263 - RNA, 34 nt, synthetic construct
  misc_feature 1..34: note = Synthetic oligonucleotide
  modified_base order(1,2,3,18,19,20,21,22,23,24,25,26,27,28,29,30,31,32,33,34): mod_base = OTHER; note = phosphorothioate (PS) backbone modification
  modified_base order(2,4,6,8,9,10,11,12,14,16,18,20): mod_base = OTHER; note = 2'-fluoro
  modified_base order(1,3,5,7,13,15,17,19): mod_base = OTHER; note = 2'-O-methyl
  modified_base order(21,22,23,24,25,26,27,28,29,30,31,32,33,34): mod_base = OTHER; note = 2'-O-methoxyethyl (2 MOE)
  modified_base 26: mod_base = OTHER; note = 5-methyl cytosine
  modified_base order(21,23,25,28,30,31,33): mod_base = OTHER; note = (21,23,25,28,30,31,33) = 5-methyl uracil
  modified_base 20: mod_base = OTHER; note = Spacer-9 linker (2-(2-(2-(bis(4-methoxyphenyl)(phenyl)methoxy)ethoxy)ethoxy )ethyl (2-cyanoethyl) diisopropylphosphoramidite)
  source 1..34: mol_type = other RNA
aggtggaaatgaagaaagtatatgtcgtattgta

SEQ ID NO: 1264 - RNA, 34 nt, synthetic construct
  misc_feature 1..34: note = Synthetic oligonucleotide
  modified_base order(1,2,3,18,19,20,21,22,23,24,25,26,27,28,29,30,31,32,33,34): mod_base = OTHER; note = phosphorothioate (PS) backbone modification
  modified_base order(2,4,6,8,9,10,11,12,14,16,18,20): mod_base = OTHER; note = 2'-fluoro
  modified_base order(1,3,5,7,13,15,17,19): mod_base = OTHER; note = 2'-O-methyl
  modified_base order(21,22,23,24,25,26,27,28,29,30,31,32,33,34): mod_base = OTHER; note = 2'-O-methoxyethyl (2 MOE)
  modified_base order(26,28,30): mod_base = OTHER; note = 5-methyl cytosine
  modified_base order(21,23,24,27,31,32,33,34): mod_base = OTHER; note = 5-methyl uracil
  modified_base 20: mod_base = OTHER; note = Spacer-9 linker (2-(2-(2-(bis(4-methoxyphenyl)(phenyl)methoxy)ethoxy)ethoxy )ethyl (2-cyanoethyl) diisopropylphosphoramidite)
  source 1..34: mol_type = other RNA
aggtggaaatgaagaaagtatattgctcgctttt

SEQ ID NO: 1265 - RNA, 34 nt, synthetic construct
  misc_feature 1..34: note = Synthetic oligonucleotide
  modified_base order(1,2,3,18,19,20,21,22,23,24,25,26,27,28,29,30,31,32,33,34): mod_base = OTHER; note = phosphorothioate (PS) backbone modification
  modified_base order(2,4,6,8,9,10,11,12,14,16,18,20): mod_base = OTHER; note = 2'-fluoro
  modified_base order(1,3,5,7,13,15,17,19): mod_base = OTHER; note = 2'-O-methyl
  modified_base order(21,22,23,24,25,26,27,28,29,30,31,32,33,34): mod_base = OTHER; note = 2'-O-methoxyethyl (2 MOE)
  modified_base order(24,30): mod_base = OTHER; note = 5-methyl cytosine
  modified_base order(21,22,23,26,27,28,31,33,34): mod_base = OTHER; note = 5-methyl uracil
  modified_base 20: mod_base = OTHER; note = Spacer-9 linker (2-(2-(2-(bis(4-methoxyphenyl)(phenyl)methoxy)ethoxy)ethoxy )ethyl (2-cyanoethyl) diisopropylphosphoramidite)
  source 1..34: mol_type = other RNA
aggtggaaatgaagaaagtatttcgtttgctgtt

SEQ ID NO: 1266 - RNA, 34 nt, synthetic construct
  misc_feature 1..34: note = Synthetic oligonucleotide
  modified_base order(1,2,3,18,19,20,21,22,23,24,25,26,27,28,29,30,31,32,33,34): mod_base = OTHER; note = phosphorothioate (PS) backbone modification
  modified_base order(2,4,6,8,9,10,11,12,14,16,18,20): mod_base = OTHER; note = 2'-fluoro
  modified_base order(1,3,5,7,13,15,17,19): mod_base = OTHER; note = 2'-O-methyl
  modified_base order(21,22,23,24,25,26,27,28,29,30,31,32,33,34): mod_base = OTHER; note = 2'-O-methoxyethyl (2 MOE)
  modified_base 26: mod_base = OTHER; note = 5-methyl cytosine
  modified_base order(21,23,24,28,29,30,31,32,33,34): mod_base = OTHER; note = 5-methyl uracil
  modified_base 20: mod_base = OTHER; note = Spacer-9 linker (2-(2-(2-(bis(4-methoxyphenyl)(phenyl)methoxy)ethoxy)ethoxy )ethyl (2-cyanoethyl) diisopropylphosphoramidite)
  source 1..34: mol_type = other RNA
aggtggaaatgaagaaagtatgttacgttttttt

SEQ ID NO: 1267 - RNA, 34 nt, synthetic construct
  misc_feature 1..34: note = Synthetic oligonucleotide
  modified_base order(1,2,3,18,19,20,21,22,23,24,25,26,27,28,29,30,31,32,33,34): mod_base = OTHER; note = phosphorothioate (PS) backbone modification
  modified_base order(2,4,6,8,9,10,11,12,14,16,18,20): mod_base = OTHER; note = 2'-fluoro
  modified_base order(1,3,5,7,13,15,17,19): mod_base = OTHER; note = 2'-O-methyl
  modified_base order(21,22,23,24,25,26,27,28,29,30,31,32,33,34): mod_base = OTHER; note = 2'-O-methoxyethyl (2 MOE)
  modified_base order(30,31,32): mod_base = OTHER; note = 5-methyl cytosine
  modified_base order(24,25): mod_base = OTHER; note = 5-methyl uracil
  modified_base 20: mod_base = OTHER; note = Spacer-9 linker (2-(2-(2-(bis(4-methoxyphenyl)(phenyl)methoxy)ethoxy)ethoxy )ethyl (2-cyanoethyl) diisopropylphosphoramidite)
  source 1..34: mol_type = other RNA
aggtggaaatgaagaaagtagggttaaaacccgg

SEQ ID NO: 1268 - RNA, 34 nt, synthetic construct
  misc_feature 1..34: note = Synthetic oligonucleotide
  modified_base order(1,2,3,18,19,20,21,22,23,24,25,26,27,28,29,30,31,32,33,34): mod_base = OTHER; note = phosphorothioate (PS) backbone modification
  modified_base order(2,4,6,8,9,10,11,12,14,16,18,20): mod_base = OTHER; note = 2'-fluoro
  modified_base order(1,3,5,7,13,15,17,19): mod_base = OTHER; note = 2'-O-methyl
  modified_base order(21,22,23,24,25,26,27,28,29,30,31,32,33,34): mod_base = OTHER; note = 2'-O-methoxyethyl (2 MOE)
  modified_base order(23,27,28): mod_base = OTHER; note = 5-methyl cytosine
  modified_base order(32,34): mod_base = OTHER; note = 5-methyl uracil
  modified_base 20: mod_base = OTHER; note = Spacer-9 linker (2-(2-(2-(bis(4-methoxyphenyl)(phenyl)methoxy)ethoxy)ethoxy )ethyl (2-cyanoethyl) diisopropylphosphoramidite)
  source 1..34: mol_type = other RNA
aggtggaaatgaagaaagtaaacgaaccgagtgt

SEQ ID NO: 1269 - RNA, 34 nt, synthetic construct
  misc_feature 1..34: note = Synthetic oligonucleotide
  modified_base order(1,2,3,18,19,20,21,22,23,24,25,26,27,28,29,30,31,32,33,34): mod_base = OTHER; note = phosphorothioate (PS) backbone modification
  modified_base order(2,4,6,8,9,10,11,12,14,16,18,20): mod_base = OTHER; note = 2'-fluoro
  modified_base order(1,3,5,7,13,15,17,19): mod_base = OTHER; note = 2'-O-methyl
  modified_base order(21,22,23,24,25,26,27,28,29,30,31,32,33,34): mod_base = OTHER; note = 2'-O-methoxyethyl (2 MOE)
  modified_base order(23,26): mod_base = OTHER; note = 5-methyl cytosine
  modified_base order(21,25,30): mod_base = OTHER; note = 5-methyl uracil
  modified_base 20: mod_base = OTHER; note = Spacer-9 linker (2-(2-(2-(bis(4-methoxyphenyl)(phenyl)methoxy)ethoxy)ethoxy )ethyl (2-cyanoethyl) diisopropylphosphoramidite)
  source 1..34: mol_type = other RNA
aggtggaaatgaagaaagtatgcatcggatgaaa

SEQ ID NO: 1270 - RNA, 34 nt, synthetic construct
  misc_feature 1..34: note = Synthetic oligonucleotide
  modified_base order(1,2,3,18,19,20,21,22,23,24,25,26,27,28,29,30,31,32,33,34): mod_base = OTHER; note = phosphorothioate (PS) backbone modification
  modified_base order(2,4,6,8,9,10,11,12,14,16,18,20): mod_base = OTHER; note = 2'-fluoro
  modified_base order(1,3,5,7,13,15,17,19): mod_base = OTHER; note = 2'-O-methyl
  modified_base order(21,22,23,24,25,26,27,28,29,30,31,32,33,34): mod_base = OTHER; note = 2'-O-methoxyethyl (2 MOE)
  modified_base order(22,31,33,34): mod_base = OTHER; note = 5-methyl cytosine
  modified_base 20: mod_base = OTHER; note = Spacer-9 linker (2-(2-(2-(bis(4-methoxyphenyl)(phenyl)methoxy)ethoxy)ethoxy )ethyl (2-cyanoethyl) diisopropylphosphoramidite)
  source 1..34: mol_type = other RNA
aggtggaaatgaagaaagtaacggaagaggcgcc

SEQ ID NO: 1271 - RNA, 34 nt, synthetic construct
  misc_feature 1..34: note = Synthetic oligonucleotide
  modified_base order(1,2,3,18,19,20,21,22,23,24,25,26,27,28,29,30,31,32,33,34): mod_base = OTHER; note = phosphorothioate (PS) backbone modification
  modified_base order(2,4,6,8,9,10,11,12,14,16,18,20): mod_base = OTHER; note = 2'-fluoro
  modified_base order(1,3,5,7,13,15,17,19): mod_base = OTHER; note = 2'-O-methyl
  modified_base order(21,22,23,24,25,26,27,28,29,30,31,32,33,34): mod_base = OTHER; note = 2'-O-methoxyethyl (2 MOE)
  modified_base order(28,30): mod_base = OTHER; note = 5-methyl cytosine
  modified_base order(22,26): mod_base = OTHER; note = 5-methyl uracil
  modified_base 20: mod_base = OTHER; note = Spacer-9 linker (2-(2-(2-(bis(4-methoxyphenyl)(phenyl)methoxy)ethoxy)ethoxy )ethyl (2-cyanoethyl) diisopropylphosphoramidite)
  source 1..34: mol_type = other RNA
aggtggaaatgaagaaagtagtaagtacgcaggg

SEQ ID NO: 1272 - RNA, 34 nt, synthetic construct
  misc_feature 1..34: note = Synthetic oligonucleotide
  modified_base order(1,2,3,18,19,20,21,22,23,24,25,26,27,28,29,30,31,32,33,34): mod_base = OTHER; note = phosphorothioate (PS) backbone modification
  modified_base order(2,4,6,8,9,10,11,12,14,16,18,20): mod_base = OTHER; note = 2'-fluoro
  modified_base order(1,3,5,7,13,15,17,19): mod_base = OTHER; note = 2'-O-methyl
  modified_base order(21,22,23,24,25,26,27,28,29,30,31,32,33,34): mod_base = OTHER; note = 2'-O-methoxyethyl (2 MOE)
  modified_base 31: mod_base = OTHER; note = 5-methyl cytosine
  modified_base order(22,27,33): mod_base = OTHER; note = 5-methyl uracil
  modified_base 20: mod_base = OTHER; note = Spacer-9 linker (2-(2-(2-(bis(4-methoxyphenyl)(phenyl)methoxy)ethoxy)ethoxy )ethyl (2-cyanoethyl) diisopropylphosphoramidite)
  source 1..34: mol_type = other RNA
aggtggaaatgaagaaagtagtaaagtgagcata

SEQ ID NO: 1273 - RNA, 34 nt, synthetic construct
  misc_feature 1..34: note = Synthetic oligonucleotide
  modified_base order(1,2,3,18,19,20,21,22,23,24,25,26,27,28,29,30,31,32,33,34): mod_base = OTHER; note = phosphorothioate (PS) backbone modification
  modified_base order(2,4,6,8,9,10,11,12,14,16,18,20): mod_base = OTHER; note = 2'-fluoro
  modified_base order(1,3,5,7,13,15,17,19): mod_base = OTHER; note = 2'-O-methyl
  modified_base order(21,22,23,24,25,26,27,28,29,30,31,32,33,34): mod_base = OTHER; note = 2'-O-methoxyethyl (2 MOE)
  modified_base 28: mod_base = OTHER; note = 5-methyl cytosine
  modified_base order(23,34): mod_base = OTHER; note = 5-methyl uracil
  modified_base 20: mod_base = OTHER; note = Spacer-9 linker (2-(2-(2-(bis(4-methoxyphenyl)(phenyl)methoxy)ethoxy)ethoxy )ethyl (2-cyanoethyl) diisopropylphosphoramidite)
  source 1..34: mol_type = other RNA
aggtggaaatgaagaaagtaaatagagcgaggat

SEQ ID NO: 1274 - RNA, 34 nt, synthetic construct
  misc_feature 1..34: note = Synthetic oligonucleotide
  modified_base order(1,2,3,18,19,20,21,22,23,24,25,26,27,28,29,30,31,32,33,34): mod_base = OTHER; note = phosphorothioate (PS) backbone modification
  modified_base order(2,4,6,8,9,10,11,12,14,16,18,20): mod_base = OTHER; note = 2'-fluoro
  modified_base order(1,3,5,7,13,15,17,19): mod_base = OTHER; note = 2'-O-methyl
  modified_base order(21,22,23,24,25,26,27,28,29,30,31,32,33,34): mod_base = OTHER; note = 2'-O-methoxyethyl (2 MOE)
  modified_base order(21,23): mod_base = OTHER; note = 5-methyl cytosine
  modified_base 30: mod_base = OTHER; note = 5-methyl uracil
  modified_base 20: mod_base = OTHER; note = Spacer-9 linker (2-(2-(2-(bis(4-methoxyphenyl)(phenyl)methoxy)ethoxy)ethoxy )ethyl (2-cyanoethyl) diisopropylphosphoramidite)
  source 1..34: mol_type = other RNA
aggtggaaatgaagaaagtacgcagagaatgaaa

SEQ ID NO: 1275 - RNA, 34 nt, synthetic construct
  misc_feature 1..34: note = Synthetic oligonucleotide
  modified_base order(1,2,3,18,19,20,21,22,23,24,25,26,27,28,29,30,31,32,33,34): mod_base = OTHER; note = phosphorothioate (PS) backbone modification
  modified_base order(2,4,6,8,9,10,11,12,14,16,18,20): mod_base = OTHER; note = 2'-fluoro
  modified_base order(1,3,5,7,13,15,17,19): mod_base = OTHER; note = 2'-O-methyl
  modified_base order(21,22,23,24,25,26,27,28,29,30,31,32,33,34): mod_base = OTHER; note = 2'-O-methoxyethyl (2 MOE)
  modified_base order(23,26,32,34): mod_base = OTHER; note = 5-methyl cytosine
  modified_base order(21,25,30,31,33): mod_base = OTHER; note = 5-methyl uracil
  modified_base 20: mod_base = OTHER; note = Spacer-9 linker (2-(2-(2-(bis(4-methoxyphenyl)(phenyl)methoxy)ethoxy)ethoxy )ethyl (2-cyanoethyl) diisopropylphosphoramidite)
  source 1..34: mol_type = other RNA
aggtggaaatgaagaaagtatgcgtcgaattctc

SEQ ID NO: 1276 - RNA, 34 nt, synthetic construct
  misc_feature 1..34: note = Synthetic oligonucleotide
  modified_base order(1,2,3,18,19,20,21,22,23,24,25,26,27,28,29,30,31,32,33,34): mod_base = OTHER; note = phosphorothioate (PS) backbone modification
  modified_base order(2,4,6,8,9,10,11,12,14,16,18,20): mod_base = OTHER; note = 2'-fluoro
  modified_base order(1,3,5,7,13,15,17,19): mod_base = OTHER; note = 2'-O-methyl
  modified_base order(21,22,23,24,25,26,27,28,29,30,31,32,33,34): mod_base = OTHER; note = 2'-O-methoxyethyl (2 MOE)
  modified_base order(22,24,30,32,34): mod_base = OTHER; note = 5-methyl cytosine
  modified_base order(21,25,26,28): mod_base = OTHER; note = 5-methyl uracil
  modified_base 20: mod_base = OTHER; note = Spacer-9 linker (2-(2-(2-(bis(4-methoxyphenyl)(phenyl)methoxy)ethoxy)ethoxy )ethyl (2-cyanoethyl) diisopropylphosphoramidite)
  source 1..34: mol_type = other RNA
aggtggaaatgaagaaagtatcacttatgcacgc

SEQ ID NO: 1277 - RNA, 34 nt, synthetic construct
  misc_feature 1..34: note = Synthetic oligonucleotide
  modified_base order(1,2,3,18,19,20,21,22,23,24,25,26,27,28,29,30,31,32,33,34): mod_base = OTHER; note = phosphorothioate (PS) backbone modification
  modified_base order(2,4,6,8,9,10,11,12,14,16,18,20): mod_base = OTHER; note = 2'-fluoro
  modified_base order(1,3,5,7,13,15,17,19): mod_base = OTHER; note = 2'-O-methyl
  modified_base order(21,22,23,24,25,26,27,28,29,30,31,32,33,34): mod_base = OTHER; note = 2'-O-methoxyethyl (2 MOE)
  modified_base order(21,22,29,34): mod_base = OTHER; note = 5-methyl cytosine
  modified_base order(23,24,26,27,33): mod_base = OTHER; note = 5-methyl uracil
  modified_base 20: mod_base = OTHER; note = Spacer-9 linker (2-(2-(2-(bis(4-methoxyphenyl)(phenyl)methoxy)ethoxy)ethoxy )ethyl (2-cyanoethyl) diisopropylphosphoramidite)
  source 1..34: mol_type = other RNA
aggtggaaatgaagaaagtaccttattacagatc

SEQ ID NO: 1278 - RNA, 34 nt, synthetic construct
  misc_feature 1..34: note = Synthetic oligonucleotide
  modified_base order(1,2,3,18,19,20,21,22,23,24,25,26,27,28,29,30,31,32,33,34): mod_base = OTHER; note = phosphorothioate (PS) backbone modification
  modified_base order(2,4,6,8,9,10,11,12,14,16,18,20): mod_base = OTHER; note = 2'-fluoro
  modified_base order(1,3,5,7,13,15,17,19): mod_base = OTHER; note = 2'-O-methyl
  modified_base order(21,22,23,24,25,26,27,28,29,30,31,32,33,34): mod_base = OTHER; note = 2'-O-methoxyethyl (2 MOE)
  modified_base order(23,24,25,26,34): mod_base = OTHER; note = 5-methyl cytosine
  modified_base order(21,22,27,28,31): mod_base = OTHER; note = 5-methyl uracil
  modified_base 20: mod_base = OTHER; note = Spacer-9 linker (2-(2-(2-(bis(4-methoxyphenyl)(phenyl)methoxy)ethoxy)ethoxy )ethyl (2-cyanoethyl) diisopropylphosphoramidite)
  source 1..34: mol_type = other RNA
aggtggaaatgaagaaagtattccccttgataac

SEQ ID NO: 1279 - RNA, 34 nt, synthetic construct
  misc_feature 1..34: note = Synthetic oligonucleotide
  modified_base order(1,2,3,18,19,20,21,22,23,24,25,26,27,28,29,30,31,32,33,34): mod_base = OTHER; note = phosphorothioate (PS) backbone modification
  modified_base order(2,4,6,8,9,10,11,12,14,16,18,20): mod_base = OTHER; note = 2'-fluoro
  modified_base order(1,3,5,7,13,15,17,19): mod_base = OTHER; note = 2'-O-methyl
  modified_base order(21,22,23,24,25,26,27,28,29,30,31,32,33,34): mod_base = OTHER; note = 2'-O-methoxyethyl (2 MOE)
  modified_base order(21,22,27,33): mod_base = OTHER; note = 5-methyl cytosine
  modified_base order(23,24,25,26,28,32): mod_base = OTHER; note = 5-methyl uracil
  modified_base 20: mod_base = OTHER; note = Spacer-9 linker (2-(2-(2-(bis(4-methoxyphenyl)(phenyl)methoxy)ethoxy)ethoxy )ethyl (2-cyanoethyl) diisopropylphosphoramidite)
  source 1..34: mol_type = other RNA
aggtggaaatgaagaaagtaccttttctagatcg

SEQ ID NO: 1280 - RNA, 34 nt, synthetic construct
  misc_feature 1..34: note = Synthetic oligonucleotide
  modified_base order(1,2,3,18,19,20,21,22,23,24,25,26,27,28,29,30,31,32,33,34): mod_base = OTHER; note = phosphorothioate (PS) backbone modification
  modified_base order(2,4,6,8,9,10,11,12,14,16,18,20): mod_base = OTHER; note = 2'-fluoro
  modified_base order(1,3,5,7,13,15,17,19): mod_base = OTHER; note = 2'-O-methyl
  modified_base order(21,22,23,24,25,26,27,28,29,30,31,32,33,34): mod_base = OTHER; note = 2'-O-methoxyethyl (2 MOE)
  modified_base order(22,23,27,28,31,32): mod_base = OTHER; note = 5-methyl cytosine
  modified_base order(21,24,26,30,33): mod_base = OTHER; note = 5-methyl uracil
  modified_base 20: mod_base = OTHER; note = Spacer-9 linker (2-(2-(2-(bis(4-methoxyphenyl)(phenyl)methoxy)ethoxy)ethoxy )ethyl (2-cyanoethyl) diisopropylphosphoramidite)
  source 1..34: mol_type = other RNA
aggtggaaatgaagaaagtatcctgtccatccta

SEQ ID NO: 1281 - RNA, 34 nt, synthetic construct
  misc_feature 1..34: note = Synthetic oligonucleotide
  modified_base order(1,2,3,18,19,20,21,22,23,24,25,26,27,28,29,30,31,32,33,34): mod_base = OTHER; note = phosphorothioate (PS) backbone modification
  modified_base order(2,4,6,8,9,10,11,12,14,16,18,20): mod_base = OTHER; note = 2'-fluoro
  modified_base order(1,3,5,7,13,15,17,19): mod_base = OTHER; note = 2'-O-methyl
  modified_base order(21,22,23,24,25,26,27,28,29,30,31,32,33,34): mod_base = OTHER; note = 2'-O-methoxyethyl (2 MOE)
  modified_base order(23,30,32,33,34): mod_base = OTHER; note = 5-methyl cytosine
  modified_base order(21,22,24,26,28,31): mod_base = OTHER; note = 5-methyl uracil
  modified_base 20: mod_base = OTHER; note = Spacer-9 linker (2-(2-(2-(bis(4-methoxyphenyl)(phenyl)methoxy)ethoxy)ethoxy )ethyl (2-cyanoethyl) diisopropylphosphoramidite)
  source 1..34: mol_type = other RNA
aggtggaaatgaagaaagtattctatgtgctccc

SEQ ID NO: 1282 - RNA, 34 nt, synthetic construct
  misc_feature 1..34: note = Synthetic oligonucleotide
  modified_base order(1,2,3,18,19,20,21,22,23,24,25,26,27,28,29,30,31,32,33,34): mod_base = OTHER; note = phosphorothioate (PS) backbone modification
  modified_base order(2,4,6,8,9,10,11,12,14,16,18,20): mod_base = OTHER; note = 2'-fluoro
  modified_base order(1,3,5,7,13,15,17,19): mod_base = OTHER; note = 2'-O-methyl
  modified_base order(21,22,23,24,25,26,27,28,29,30,31,32,33,34): mod_base = OTHER; note = 2'-O-methoxyethyl (2 MOE)
  modified_base order(23,25,26,30,34): mod_base = OTHER; note = 5-methyl cytosine
  modified_base order(21,24,27,28,29,32,33): mod_base = OTHER; note = 5-methyl uracil
  modified_base 20: mod_base = OTHER; note = Spacer-9 linker (2-(2-(2-(bis(4-methoxyphenyl)(phenyl)methoxy)ethoxy)ethoxy )ethyl (2-cyanoethyl) diisopropylphosphoramidite)
  source 1..34: mol_type = other RNA
aggtggaaatgaagaaagtatactcctttcattc

SEQ ID NO: 1283 - RNA, 34 nt, synthetic construct
  misc_feature 1..34: note = Synthetic oligonucleotide
  modified_base order(1,2,3,18,19,20,21,22,23,24,25,26,27,28,29,30,31,32,33,34): mod_base = OTHER; note = phosphorothioate (PS) backbone modification
  modified_base order(2,4,6,8,9,10,11,12,14,16,18,20): mod_base = OTHER; note = 2'-fluoro
  modified_base order(1,3,5,7,13,15,17,19): mod_base = OTHER; note = 2'-O-methyl
  modified_base order(21,22,23,24,25,26,27,28,29,30,31,32,33,34): mod_base = OTHER; note = 2'-O-methoxyethyl (2 MOE)
  modified_base order(23,30,31): mod_base = OTHER; note = 5-methyl cytosine
  modified_base order(24,26,27,29,33): mod_base = OTHER; note = 5-methyl uracil
  modified_base 20: mod_base = OTHER; note = Spacer-9 linker (2-(2-(2-(bis(4-methoxyphenyl)(phenyl)methoxy)ethoxy)ethoxy )ethyl (2-cyanoethyl) diisopropylphosphoramidite)
  source 1..34: mol_type = other RNA
aggtggaaatgaagaaagtaggctattatccata

SEQ ID NO: 1284 - RNA, 34 nt, synthetic construct
  misc_feature 1..34: note = Synthetic oligonucleotide
  modified_base order(1,2,3,18,19,20,21,22,23,24,25,26,27,28,29,30,31,32,33,34): mod_base = OTHER; note = phosphorothioate (PS) backbone modification
  modified_base order(2,4,6,8,9,10,11,12,14,16,18,20): mod_base = OTHER; note = 2'-fluoro
  modified_base order(1,3,5,7,13,15,17,19): mod_base = OTHER; note = 2'-O-methyl
  modified_base order(21,22,23,24,25,26,27,28,29,30,31,32,33,34): mod_base = OTHER; note = 2'-O-methoxyethyl (2 MOE)
  modified_base order(24,26,30): mod_base = OTHER; note = 5-methyl cytosine
  modified_base order(21,22,25): mod_base = OTHER; note = 5-methyl uracil
  modified_base 20: mod_base = OTHER; note = Spacer-9 linker (2-(2-(2-(bis(4-methoxyphenyl)(phenyl)methoxy)ethoxy)ethoxy )ethyl (2-cyanoethyl) diisopropylphosphoramidite)
  source 1..34: mol_type = other RNA
aggtggaaatgaagaaagtattactcaggcagga

SEQ ID NO: 1285 - RNA, 34 nt, synthetic construct
  misc_feature 1..34: note = Synthetic oligonucleotide
  modified_base order(1,2,3,18,19,20,21,22,23,24,25,26,27,28,29,30,31,32,33,34): mod_base = OTHER; note = phosphorothioate (PS) backbone modification
  modified_base order(2,4,6,8,9,10,11,12,14,16,18,20): mod_base = OTHER; note = 2'-fluoro
  modified_base order(1,3,5,7,13,15,17,19): mod_base = OTHER; note = 2'-O-methyl
  modified_base order(21,22,23,24,25,26,27,28,29,30,31,32,33,34): mod_base = OTHER; note = 2'-O-methoxyethyl (2 MOE)
  modified_base order(26,29,30,33): mod_base = OTHER; note = 5-methyl cytosine
  modified_base order(22,24,32): mod_base = OTHER; note = 5-methyl uracil
  modified_base 20: mod_base = OTHER; note = Spacer-9 linker (2-(2-(2-(bis(4-methoxyphenyl)(phenyl)methoxy)ethoxy)ethoxy )ethyl (2-cyanoethyl) diisopropylphosphoramidite)
  source 1..34: mol_type = other RNA
aggtggaaatgaagaaagtaatgtgcaaccatcg

SEQ ID NO: 1286 - RNA, 34 nt, synthetic construct
  misc_feature 1..34: note = Synthetic oligonucleotide
  modified_base order(1,2,3,18,19,20,21,22,23,24,25,26,27,28,29,30,31,32,33,34): mod_base = OTHER; note = phosphorothioate (PS) backbone modification
  modified_base order(2,4,6,8,9,10,11,12,14,16,18,20): mod_base = OTHER; note = 2'-fluoro
  modified_base order(1,3,5,7,13,15,17,19): mod_base = OTHER; note = 2'-O-methyl
  modified_base order(21,22,23,24,25,26,27,28,29,30,31,32,33,34): mod_base = OTHER; note = 2'-O-methoxyethyl (2 MOE)
  modified_base order(21,22,32): mod_base = OTHER; note = 5-methyl cytosine
  modified_base order(25,27,29,31): mod_base = OTHER; note = 5-methyl uracil
  modified_base 20: mod_base = OTHER; note = Spacer-9 linker (2-(2-(2-(bis(4-methoxyphenyl)(phenyl)methoxy)ethoxy)ethoxy )ethyl (2-cyanoethyl) diisopropylphosphoramidite)
  source 1..34: mol_type = other RNA
aggtggaaatgaagaaagtaccggtgtatgtcaa

SEQ ID NO: 1287 - RNA, 34 nt, synthetic construct
  misc_feature 1..34: note = Synthetic oligonucleotide
  modified_base order(1,2,3,18,19,20,21,22,23,24,25,26,27,28,29,30,31,32,33,34): mod_base = OTHER; note = phosphorothioate (PS) backbone modification
  modified_base order(2,4,6,8,9,10,11,12,14,16,18,20): mod_base = OTHER; note = 2'-fluoro
  modified_base order(1,3,5,7,13,15,17,19): mod_base = OTHER; note = 2'-O-methyl
  modified_base order(21,22,23,24,25,26,27,28,29,30,31,32,33,34): mod_base = OTHER; note = 2'-O-methoxyethyl (2 MOE)
  modified_base order(26,31,32): mod_base = OTHER; note = 5-methyl cytosine
  modified_base order(21,22,23,25,29): mod_base = OTHER; note = 5-methyl uracil
  modified_base 20: mod_base = OTHER; note = Spacer-9 linker (2-(2-(2-(bis(4-methoxyphenyl)(phenyl)methoxy)ethoxy)ethoxy )ethyl (2-cyanoethyl) diisopropylphosphoramidite)
  source 1..34: mol_type = other RNA
aggtggaaatgaagaaagtatttgtcggtaccaa

SEQ ID NO: 1288 - RNA, 34 nt, synthetic construct
  misc_feature 1..34: note = Synthetic oligonucleotide
  modified_base order(1,2,3,18,19,20,21,22,23,24,25,26,27,28,29,30,31,32,33,34): mod_base = OTHER; note = phosphorothioate (PS) backbone modification
  modified_base order(2,4,6,8,9,10,11,12,14,16,18,20): mod_base = OTHER; note = 2'-fluoro
  modified_base order(1,3,5,7,13,15,17,19): mod_base = OTHER; note = 2'-O-methyl
  modified_base order(21,22,23,24,25,26,27,28,29,30,31,32,33,34): mod_base = OTHER; note = 2'-O-methoxyethyl (2 MOE)
  modified_base order(21,23,29,31,32): mod_base = OTHER; note = 5-methyl cytosine
  modified_base order(22,24,33): mod_base = OTHER; note = 5-methyl uracil
  modified_base 20: mod_base = OTHER; note = Spacer-9 linker (2-(2-(2-(bis(4-methoxyphenyl)(phenyl)methoxy)ethoxy)ethoxy )ethyl (2-cyanoethyl) diisopropylphosphoramidite)
  source 1..34: mol_type = other RNA
aggtggaaatgaagaaagtactctaaggcacctg

SEQ ID NO: 1289 - RNA, 20 nt, synthetic construct
  misc_feature 1..20: note = Synthetic oligonucleotide
  source 1..20: mol_type = other RNA
aggtggaaatgaagaaagta

SEQ ID NO: 1290 - RNA, 22 nt, synthetic construct
  misc_feature 1..22: note = Synthetic oligonucleotide
  source 1..22: mol_type = other RNA
tactttcttcatttccaccttt

SEQ ID NO: 1291 - RNA, 19 nt, synthetic construct
  misc_feature 1..19: note = Synthetic oligonucleotide
  modified_base order(1,2,3,17,18,19): mod_base = OTHER; note = phosphorothioate (PS) backbone modification
  modified_base order(2,4,7,8,9,10,11,13,15,17,19): mod_base = OTHER; note = 2'-fluoro
  modified_base order(1,3,5,6,12,14,16,18): mod_base = OTHER; note = 2'-O-methyl
  modified_base 5: mod_base = OTHER; note = C6x1 linker ((2S,3S,4S,5S)-2-((bis(4-methoxyphenyl)(phenyl)methoxy)meth yl)-5-methoxy-4-(pent-4-yn-1-yloxy)tetrahydrofuran-3-yl (2-cyanoethyl) diisopropylphosphoramidite)
  source 1..19: mol_type = other RNA
aggtgaaatgaagaaagta

SEQ ID NO: 1292 - RNA, 19 nt, synthetic construct
  misc_feature 1..19: note = Synthetic oligonucleotide
  modified_base order(1,2,3,17,18,19): mod_base = OTHER; note = phosphorothioate (PS) backbone modification
  modified_base order(2,4,7,8,9,10,11,13,15,17,19): mod_base = OTHER; note = 2'-fluoro
  modified_base order(1,3,5,6,12,14,16,18): mod_base = OTHER; note = 2'-O-methyl
  modified_base 5: mod_base = OTHER; note = C6x2 linker ((2S,3S,4S,5S)-5-((bis(4-methoxyphenyl)(phenyl)methoxy)meth yl)-2-methoxy-4-(pent-4-yn-1-yloxy)tetrahydrofuran-3-yl (2-cyanoethyl) diisopropylphosphoramidite)
  source 1..19: mol_type = other RNA
aggtgaaatgaagaaagta

SEQ ID NO: 1293 - RNA, 19 nt, synthetic construct
  misc_feature 1..19: note = Synthetic oligonucleotide
  modified_base order(1,2,3,17,18,19): mod_base = OTHER; note = phosphorothioate (PS) backbone modification
  modified_base order(2,4,7,8,9,10,11,13,15,17,19): mod_base = OTHER; note = 2'-fluoro
  modified_base order(1,3,5,6,12,14,16,18): mod_base = OTHER; note = 2'-O-methyl
  modified_base 5: mod_base = OTHER; note = C6x5 linker (2-((2-(bis(4-methoxyphenyl)(phenyl)methoxy)ethyl)(pent-4-y n-1-yl)amino)ethyl (2-cyanoethyl) diisopropylphosphoramidite)
  source 1..19: mol_type = other RNA
aggtgaaatgaagaaagta

SEQ ID NO: 1294 - RNA, 33 nt, synthetic construct
  misc_feature 1..33: note = Synthetic oligonucleotide
  modified_base order(1,2,3,6,7,8,9,10,11,12,13,14,15,16,17,18,19,31,32,33): mod_base = OTHER; note = phosphorothioate (PS) backbone modification
  modified_base order(2,4,21,22,23,24,25,27,29,31,33): mod_base = OTHER; note = 2'-fluoro
  modified_base order(1,3,5,20,26,28,30,32): mod_base = OTHER; note = 2'-O-methyl
  modified_base order(6,7,8,9,10,11,12,13,14,15,16,17,18,19): mod_base = OTHER; note = 2'-O-methoxyethyl (2 MOE)
  modified_base 13: mod_base = OTHER; note = 5-methyl cytosine
  modified_base order(6,7,9,11,12,14,16,18,19): mod_base = OTHER; note = 5-methyl uracil
  modified_base 6: mod_base = OTHER; note = C6x7 linker ((9H-fluoren-9-yl)methyl (4-((2S,4R)-2-((bis(4-methoxyphenyl)(phenyl)methoxy)methyl) -4-((bis(diisopropylamino)phosphanyl)oxy)pyrrolidin-1-yl)-4 -oxobutyl)carbamate)
  source 1..33: mol_type = other RNA
aggtgttgtattctatgttaaatgaagaaagta

SEQ ID NO: 1295 - RNA, 34 nt, synthetic construct; identical to SEQ ID NO: 1197
  misc_feature 1..34: note = Synthetic oligonucleotide
  modified_base order(1,2,3,18,19,20,21,22,23,24,25,26,27,28,29,30,31,32,33,34): mod_base = OTHER; note = phosphorothioate (PS) backbone modification
  modified_base order(2,4,6,8,9,10,11,12,14,16,18,20): mod_base = OTHER; note = 2'-fluoro
  modified_base order(1,3,5,7,13,15,17,19): mod_base = OTHER; note = 2'-O-methyl
  modified_base order(21,22,23,24,25,26,27,28,29,30,31,32,33,34): mod_base = OTHER; note = 2'-O-methoxyethyl (2 MOE)
  modified_base 28: mod_base = OTHER; note = 5-methyl cytosine
  modified_base order(21,22,24,26,27,29,31,33,34): mod_base = OTHER; note = 5-methyl uracil
  modified_base 20: mod_base = OTHER; note = Spacer-9 linker (2-(2-(2-(bis(4-methoxyphenyl)(phenyl)methoxy)ethoxy)ethoxy )ethyl (2-cyanoethyl) diisopropylphosphoramidite)
  source 1..34: mol_type = other RNA

SEQ ID NO: 1296 - RNA, 34 nt, synthetic construct; identical to SEQ ID NO: 1197
  misc_feature 1..34: note = Synthetic oligonucleotide
  modified_base order(1,2,3,18,19,20,21,22,23,24,25,26,27,28,29,30,31,32,33,34): mod_base = OTHER; note = phosphorothioate (PS) backbone modification
  modified_base order(2,4,6,8,9,10,11,12,14,16,18,20): mod_base = OTHER; note = 2'-fluoro
  modified_base order(1,3,5,7,13,15,17,19): mod_base = OTHER; note = 2'-O-methyl
  modified_base order(21,22,23,24,25,26,27,28,29,30,31,32,33,34): mod_base = OTHER; note = 2'-O-methoxyethyl (2 MOE)
  modified_base 28: mod_base = OTHER; note = 5-methyl cytosine
  modified_base order(21,22,24,26,27,29,31,33,34): mod_base = OTHER; note = 5-methyl uracil
  modified_base 20: mod_base = OTHER; note = spacer-18 linker (1,1-bis(4-methoxyphenyl)-1-phenyl-2,5,8,11,14,17-hexaoxano nadecan-19-yl (2-cyanoethyl) diisopropylphosphoramidite)
  source 1..34: mol_type = other RNA

SEQ ID NO: 1297 - RNA, 34 nt, synthetic construct; identical to SEQ ID NO: 1197
  misc_feature 1..34: note = Synthetic oligonucleotide
  modified_base order(1,2,3,18,19,20,21,22,23,24,25,26,27,28,29,30,31,32,33,34): mod_base = OTHER; note = phosphorothioate (PS) backbone modification
  modified_base order(2,4,6,8,9,10,11,12,14,16,18,20): mod_base = OTHER; note = 2'-fluoro
  modified_base order(1,3,5,7,13,15,17,19): mod_base = OTHER; note = 2'-O-methyl
  modified_base order(21,22,23,24,25,26,27,28,29,30,31,32,33,34): mod_base = OTHER; note = 2'-O-methoxyethyl (2 MOE)
  modified_base order(21,22,24,26,27,29,31,33,34): mod_base = OTHER; note = 5-methyl uracil
  modified_base 20: mod_base = OTHER; note = Spacer-C6 linker (6-(bis(4-methoxyphenyl)(phenyl)methoxy)hexyl (2-cyanoethyl) diisopropylphosphoramidite)
  source 1..34: mol_type = other RNA

SEQ ID NO: 1298 - RNA, 34 nt, synthetic construct; identical to SEQ ID NO: 1197
  misc_feature 1..34: note = Synthetic oligonucleotide
  modified_base order(1,2,3,18,19,20,21,22,33,34): mod_base = OTHER; note = phosphorothioate (PS) backbone modification
  modified_base order(2,4,6,8,9,10,11,12,14,16,18,20): mod_base = OTHER; note = 2'-fluoro
  modified_base order(1,3,5,7,13,15,17,19): mod_base = OTHER; note = 2'-O-methyl
  modified_base order(21,22,23,24,25,26,27,28,29,30,31,32,33,34): mod_base = OTHER; note = 2'-O-methoxyethyl (2 MOE)
  modified_base 28: mod_base = OTHER; note = 5-methyl cytosine
  modified_base order(21,22,24,26,27,29,31,33,34): mod_base = OTHER; note = 5-methyl uracil
  modified_base 20: mod_base = OTHER; note = Spacer-9 linker (2-(2-(2-(bis(4-methoxyphenyl)(phenyl)methoxy)ethoxy)ethoxy )ethyl (2-cyanoethyl) diisopropylphosphoramidite)
  source 1..34: mol_type = other RNA

SEQ ID NO: 1299 - RNA, 14 nt, synthetic construct
  misc_feature 1..14: note = Synthetic oligonucleotide
  modified_base order(1,2,3,4,5,6,7,8,9,10,11,12,13,14): mod_base = OTHER; note = phosphorothioate (PS) backbone modification
  modified_base order(1,2,3,4,5,6,7,8,9,10,11,12,13,14): mod_base = OTHER; note = 2'-O-methoxyethyl (2 MOE)
  modified_base 8: mod_base = OTHER; note = 5-methyl cytosine
  modified_base order(1,2,4,6,7,9,11,13,14): mod_base = OTHER; note = 5-methyl uracil
  source 1..14: mol_type = other RNA
ttgtattctatgtt

SEQ ID NO: 1300 - RNA, 14 nt, synthetic construct
  misc_feature 1..14: note = Synthetic oligonucleotide
  modified_base order(1,2,3,4,5,6,7,8,9,10,11,12,13,14): mod_base = OTHER; note = phosphorothioate (PS) backbone modification
  modified_base order(1,2,3,4,5,6,7,8,9,10,11,12,13,14): mod_base = OTHER; note = 2'-O-methoxyethyl (2 MOE)
  modified_base 8: mod_base = OTHER; note = 5-methyl cytosine
  modified_base order(1,2,4,6,7,9,10,12,14): mod_base = OTHER; note = 5-methyl uracil
  source 1..14: mol_type = other RNA
ttgtattcttgtat

SEQ ID NO: 1301 - RNA, 14 nt, synthetic construct
  misc_feature 1..14: note = Synthetic oligonucleotide
  modified_base order(1,2,3,4,5,6,7,8,9,10,11,12,13,14): mod_base = OTHER; note = phosphorothioate (PS) backbone modification
  modified_base order(1,2,3,4,5,6,7,8,9,10,11,12,13,14): mod_base = OTHER; note = 2'-O-methoxyethyl (2 MOE)
  modified_base 8: mod_base = OTHER; note = 5-methyl cytosine
  modified_base order(1,3,5,6,7,9,11,13,14): mod_base = OTHER; note = 5-methyl uracil
  source 1..14: mol_type = other RNA
tatgtttctatgtt

SEQ ID NO: 1302 - RNA, 14 nt, synthetic construct
  misc_feature 1..14: note = Synthetic oligonucleotide
  modified_base order(1,2,3,4,5,6,7,8,9,10,11,12,13,14): mod_base = OTHER; note = phosphorothioate (PS) backbone modification
  modified_base order(1,2,3,4,5,6,7,8,9,10,11,12,13,14): mod_base = OTHER; note = 2'-O-methoxyethyl (2 MOE)
  modified_base 7: mod_base = OTHER; note = 5-methyl cytosine
  modified_base order(1,2,4,6,8,9,11,13,14): mod_base = OTHER; note = 5-methyl uracil
  source 1..14: mol_type = other RNA
ttgtatcttatgtt

SEQ ID NO: 1303 - RNA, 12 nt, synthetic construct
  misc_feature 1..12: note = Synthetic oligonucleotide
  modified_base order(1,2,3,4,5,6,7,8,9,10,11,12): mod_base = OTHER; note = phosphorothioate (PS) backbone modification
  modified_base order(1,2,3,4,5,6,7,8,9,10,11,12): mod_base = OTHER; note = 2'-O-methoxyethyl (2 MOE)
  modified_base order(1,2,4,6,7,9,11,12): mod_base = OTHER; note = 5-methyl uracil
  source 1..12: mol_type = other RNA
ttgtattatgtt

SEQ ID NO: 1304 - RNA, 14 nt, synthetic construct
  misc_feature 1..14: note = Synthetic oligonucleotide
  modified_base order(1,2,3,4,5,6,7,8,9,10,11,12,13,14): mod_base = OTHER; note = phosphorothioate (PS) backbone modification
  modified_base order(1,2,3,4,5,6,7,8,9,10,11,12,13,14): mod_base = OTHER; note = 2'-O-methoxyethyl (2 MOE)
  modified_base order(7,8): mod_base = OTHER; note = 5-methyl cytosine
  modified_base order(1,2,4,6,9,11,13,14): mod_base = OTHER; note = 5-methyl uracil
  source 1..14: mol_type = other RNA
ttgtatcctatgtt

SEQ ID NO: 1305-1306 - skipped (2 entries)

SEQ ID NO: 1307 - RNA, 11 nt, synthetic construct
  misc_feature 1..11: note = Synthetic oligonucleotide
  modified_base order(1,2,3,4,5,6,7,8,9,10,11): mod_base = OTHER; note = phosphorothioate (PS) backbone modification
  modified_base order(1,2,3,4,5,6,7,8,9,10,11): mod_base = OTHER; note = 2'-O-methoxyethyl (2 MOE)
  modified_base 8: mod_base = OTHER; note = 5-methyl cytosine
  modified_base order(1,2,4,6,7,9,11): mod_base = OTHER; note = 5-methyl uracil
  source 1..11: mol_type = other RNA
ttgtattctat

SEQ ID NO: 1308 - RNA, 14 nt, synthetic construct
  misc_feature 1..14: note = Synthetic oligonucleotide
  modified_base order(1,2,3,4,5,6,7,8,9,10,11,12,13,14): mod_base = OTHER; note = phosphorothioate (PS) backbone modification
  modified_base order(1,2,3,4,5,6,7,8,9,10,11,12,13,14): mod_base = OTHER; note = 2'-O-methoxyethyl (2 MOE)
  modified_base order(1,2,4,6,9,11,13,14): mod_base = OTHER; note = 5-methyl uracil
  source 1..14: mol_type = other RNA
ttgtatagtatgtt

SEQ ID NO: 1309 - RNA, 14 nt, synthetic construct
  misc_feature 1..14: note = Synthetic oligonucleotide
  modified_base order(1,2,3,4,5,6,7,8,9,10,11,12,13,14): mod_base = OTHER; note = phosphorothioate (PS) backbone modification
  modified_base order(1,2,3,4,5,6,7,8,9,10,11,12,13,14): mod_base = OTHER; note = 2'-O-methoxyethyl (2 MOE)
  modified_base 8: mod_base = OTHER; note = 5-methyl cytosine
  modified_base order(1,4,6,7,9,11,14): mod_base = OTHER; note = 5-methyl uracil
  source 1..14: mol_type = other RNA
tagtattctatgat

SEQ ID NO: 1310 - RNA, 14 nt, synthetic construct
  misc_feature 1..14: note = Synthetic oligonucleotide
  modified_base order(1,2,3,4,5,6,7,8,9,10,11,12,13,14): mod_base = OTHER; note = phosphorothioate (PS) backbone modification
  modified_base order(1,2,3,4,5,6,7,8,9,10,11,12,13,14): mod_base = OTHER; note = 2'-O-methoxyethyl (2 MOE)
  modified_base order(3,8,12): mod_base = OTHER; note = 5-methyl cytosine
  modified_base order(1,4,6,7,9,11,14): mod_base = OTHER; note = 5-methyl uracil
  source 1..14: mol_type = other RNA
tactattctatcat

SEQ ID NO: 1311 - RNA, 14 nt, synthetic construct
  misc_feature 1..14: note = Synthetic oligonucleotide
  modified_base order(1,2,3,4,5,6,7,8,9,10,11,12,13,14): mod_base = OTHER; note = phosphorothioate (PS) backbone modification
  modified_base order(1,2,3,4,5,6,7,8,9,10,11,12,13,14): mod_base = OTHER; note = 2'-O-methoxyethyl (2 MOE)
  modified_base order(3,8,12): mod_base = OTHER; note = 5-methyl cytosine
  modified_base order(1,5,7,10,14): mod_base = OTHER; note = 5-methyl uracil
  source 1..14: mol_type = other RNA
tacatatcatacat

SEQ ID NO: 1312 - RNA, 14 nt, synthetic construct
  misc_feature 1..14: note = Synthetic oligonucleotide
  modified_base order(1,2,3,4,5,6,7,8,9,10,11,12,13,14): mod_base = OTHER; note = phosphorothioate (PS) backbone modification
  modified_base order(1,2,3,4,5,6,7,8,9,10,11,12,13,14): mod_base = OTHER; note = 2'-O-methoxyethyl (2 MOE)
  modified_base 8: mod_base = OTHER; note = 5-methyl cytosine
  modified_base order(1,2,4,6,7,9,11,13,14): mod_base = OTHER; note = 5-methyl uracil
  source 1..14: mol_type = other RNA
ttatattctatatt

SEQ ID NO: 1313 - RNA, 14 nt, synthetic construct
  misc_feature 1..14: note = Synthetic oligonucleotide
  modified_base order(1,2,3,4,5,6,7,8,9,10,11,12,13,14): mod_base = OTHER; note = phosphorothioate (PS) backbone modification
  modified_base order(1,2,3,4,5,6,7,8,9,10,11,12,13,14): mod_base = OTHER; note = 2'-O-methoxyethyl (2 MOE)
  modified_base 8: mod_base = OTHER; note = 5-methyl cytosine
  modified_base order(1,2,4,6,7,9,11,13,14): mod_base = OTHER; note = 5-methyl uracil
  source 1..14: mol_type = other RNA
ttatattctatgtt

SEQ ID NO: 1314 - RNA, 14 nt, synthetic construct
  misc_feature 1..14: note = Synthetic oligonucleotide
  modified_base order(1,2,3,4,5,6,7,8,9,10,11,12,13,14): mod_base = OTHER; note = phosphorothioate (PS) backbone modification
  modified_base order(1,2,3,4,5,6,7,8,9,10,11,12,13,14): mod_base = OTHER; note = 2'-O-methoxyethyl (2 MOE)
  modified_base 8: mod_base = OTHER; note = 5-methyl cytosine
  modified_base order(1,4,6,7,9,11,13,14): mod_base = OTHER; note = 5-methyl uracil
  source 1..14: mol_type = other RNA
tagtattctatgtt

SEQ ID NO: 1315 - RNA, 14 nt, synthetic construct
  misc_feature 1..14: note = Synthetic oligonucleotide
  modified_base order(1,2,13,14): mod_base = OTHER; note = phosphorothioate (PS) backbone modification
  modified_base order(1,2,3,4,5,6,7,8,9,10,11,12,13,14): mod_base = OTHER; note = 2'-O-methoxyethyl (2 MOE)
  modified_base 8: mod_base = OTHER; note = 5-methyl cytosine
  modified_base order(1,2,4,6,7,9,11,13,14): mod_base = OTHER; note = 5-methyl uracil
  source 1..14: mol_type = other RNA
ttgtattctatgtt

SEQ ID NO: 1316 - RNA, 14 nt, synthetic construct
  misc_feature 1..14: note = Synthetic oligonucleotide
  modified_base order(1,2,3,12,13,14): mod_base = OTHER; note = phosphorothioate (PS) backbone modification
  modified_base order(1,2,3,4,5,6,7,8,9,10,11,12,13,14): mod_base = OTHER; note = 2'-O-methoxyethyl (2 MOE)
  modified_base 8: mod_base = OTHER; note = 5-methyl cytosine
  modified_base order(1,2,4,6,7,9,11,13,14): mod_base = OTHER; note = 5-methyl uracil
  source 1..14: mol_type = other RNA
ttgtattctatgtt

SEQ ID NO: 1317 - RNA, 14 nt, synthetic construct
  misc_feature 1..14: note = Synthetic oligonucleotide
  modified_base order(1,2,3,4,11,12,13,14): mod_base = OTHER; note = phosphorothioate (PS) backbone modification
  modified_base order(1,2,3,4,5,6,7,8,9,10,11,12,13,14): mod_base = OTHER; note = 2'-O-methoxyethyl (2 MOE)
  modified_base 8: mod_base = OTHER; note = 5-methyl cytosine
  modified_base order(1,2,4,6,7,9,11,13,14): mod_base = OTHER; note = 5-methyl uracil
  source 1..14: mol_type = other RNA
ttgtattctatgtt

SEQ ID NO: 1318 - RNA, 14 nt, synthetic construct
  misc_feature 1..14: note = Synthetic oligonucleotide
  modified_base order(1,2,3,4,5,10,11,12,13,14): mod_base = OTHER; note = phosphorothioate (PS) backbone modification
  modified_base order(1,2,3,4,5,6,7,8,9,10,11,12,13,14): mod_base = OTHER; note = 2'-O-methoxyethyl (2 MOE)
  modified_base 8: mod_base = OTHER; note = 5-methyl cytosine
  modified_base order(1,2,4,6,7,9,11,13,14): mod_base = OTHER; note = 5-methyl uracil
  source 1..14: mol_type = other RNA
ttgtattctatgtt

SEQ ID NO: 1319 - RNA, 14 nt, synthetic construct
  misc_feature 1..14: note = Synthetic oligonucleotide
  modified_base order(1,2,3,4,5,6,9,10,11,12,13,14): mod_base = OTHER; note = phosphorothioate (PS) backbone modification
  modified_base order(1,2,3,4,5,6,7,8,9,10,11,12,13,14): mod_base = OTHER; note = 2'-O-methoxyethyl (2 MOE)
  modified_base 8: mod_base = OTHER; note = 5-methyl cytosine
  modified_base order(1,2,4,6,7,9,11,13,14): mod_base = OTHER; note = 5-methyl uracil
  source 1..14: mol_type = other RNA
ttgtattctatgtt

SEQ ID NO: 1320 - RNA, 14 nt, synthetic construct
  misc_feature 1..14: note = Synthetic oligonucleotide
  modified_base order(1,2,3,4,5,6,7,8,9,10,11,12,13,14): mod_base = OTHER; note = phosphorothioate (PS) backbone modification
  modified_base order(1,2,3,4,5,6,7,8,9,10,11,12,13,14): mod_base = OTHER; note = 2'-O-methoxyethyl (2 MOE)
  modified_base 8: mod_base = OTHER; note = 5-methyl cytosine
  modified_base order(1,2,4,6,7,9,11,13,14): mod_base = OTHER; note = 5-methyl uracil
  source 1..14: mol_type = other RNA
ttgtattctatgtt

SEQ ID NO: 1321 - RNA, 14 nt, synthetic construct
  misc_feature 1..14: note = Synthetic oligonucleotide
  modified_base order(1,2,3,4,5,6,7,8,9,10,11,12,13,14): mod_base = OTHER; note = phosphorothioate (PS) backbone modification
  modified_base order(7,8): mod_base = OTHER; note = 2'-O-methyl
  modified_base order(1,2,3,4,5,6,9,10,11,12,13,14): mod_base = OTHER; note = 2'-O-methoxyethyl (2 MOE)
  modified_base order(1,2,4,6,9,11,13,14): mod_base = OTHER; note = 5-methyl uracil
  source 1..14: mol_type = other RNA
ttgtattctatgtt

SEQ ID NO: 1322 - RNA, 14 nt, synthetic construct
  misc_feature 1..14: note = Synthetic oligonucleotide
  modified_base order(1,2,3,4,5,6,7,8,9,10,11,12,13,14): mod_base = OTHER; note = phosphorothioate (PS) backbone modification
  modified_base order(6,7,8,9): mod_base = OTHER; note = 2'-O-methyl
  modified_base order(1,2,3,4,5,10,11,12,13,14): mod_base = OTHER; note = 2'-O-methoxyethyl (2 MOE)
  modified_base order(1,2,4,11,13,14): mod_base = OTHER; note = 5-methyl uracil
  source 1..14: mol_type = other RNA
ttgtattctatgtt

SEQ ID NO: 1323 - RNA, 14 nt, synthetic construct
  misc_feature 1..14: note = Synthetic oligonucleotide
  modified_base order(1,2,3,4,5,6,7,8,9,10,11,12,13,14): mod_base = OTHER; note = phosphorothioate (PS) backbone modification
  modified_base order(5,6,7,8,9,10): mod_base = OTHER; note = 2'-O-methyl
  modified_base order(1,2,3,4,11,12,13,14): mod_base = OTHER; note = 2'-O-methoxyethyl (2 MOE)
  modified_base order(1,2,4,11,13,14): mod_base = OTHER; note = 5-methyl uracil
  source 1..14: mol_type = other RNA
ttgtattctatgtt

SEQ ID NO: 1324 - RNA, 14 nt, synthetic construct
  misc_feature 1..14: note = Synthetic oligonucleotide
  modified_base order(1,2,3,4,5,6,7,8,9,10,11,12,13,14): mod_base = OTHER; note = phosphorothioate (PS) backbone modification
  modified_base order(4,5,6,7,8,9,10,11): mod_base = OTHER; note = 2'-O-methyl
  modified_base order(1,2,3,12,13,14): mod_base = OTHER; note = 2'-O-methoxyethyl (2 MOE)
  modified_base order(1,2,13,14): mod_base = OTHER; note = 5-methyl uracil
  source 1..14: mol_type = other RNA
ttgtattctatgtt

SEQ ID NO: 1325 - RNA, 14 nt, synthetic construct
  misc_feature 1..14: note = Synthetic oligonucleotide
  modified_base order(1,2,3,4,5,6,7,8,9,10,11,12,13,14): mod_base = OTHER; note = phosphorothioate (PS) backbone modification
  modified_base order(3,4,5,6,7,8,9,10,11,12): mod_base = OTHER; note = 2'-O-methyl
  modified_base order(1,2,13,14): mod_base = OTHER; note = 2'-O-methoxyethyl (2 MOE)
  modified_base order(1,2,13,14): mod_base = OTHER; note = 5-methyl uracil
  source 1..14: mol_type = other RNA
ttgtattctatgtt

SEQ ID NO: 1326 - RNA, 14 nt, synthetic construct
  misc_feature 1..14: note = Synthetic oligonucleotide
  modified_base order(1,2,3,4,5,6,7,8,9,10,11,12,13,14): mod_base = OTHER; note = phosphorothioate (PS) backbone modification
  modified_base order(2,3,4,5,6,7,8,9,10,11,12,13): mod_base = OTHER; note = 2'-O-methyl
  modified_base order(1,14): mod_base = OTHER; note = 2'-O-methoxyethyl (2 MOE)
  modified_base order(1,14): mod_base = OTHER; note = 5-methyl uracil
  source 1..14: mol_type = other RNA
ttgtattctatgtt

SEQ ID NO: 1327 - RNA, 14 nt, synthetic construct
  misc_feature 1..14: note = Synthetic oligonucleotide
  modified_base order(1,2,3,4,5,6,7,8,9,10,11,12,13,14): mod_base = OTHER; note = phosphorothioate (PS) backbone modification
  modified_base order(1,2,3,4,5,6,7,8,9,10,11,12,13,14): mod_base = OTHER; note = 2'-O-methyl
  source 1..14: mol_type = other RNA
ttgtattctatgtt

SEQ ID NO: 1328 - RNA, 13 nt, synthetic construct
  misc_feature 1..13: note = Synthetic oligonucleotide
  modified_base order(1,2,3,4,5,6,7,8,9,10,11,12,13): mod_base = OTHER; note = phosphorothioate (PS) backbone modification
  modified_base order(1,2,3,4,5,6,7,8,9,10,11,12,13): mod_base = OTHER; note = 2'-O-methoxyethyl (2 MOE)
  modified_base 8: mod_base = OTHER; note = 5-methyl cytosine
  modified_base order(1,2,4,6,7,9,11,13): mod_base = OTHER; note = 5-methyl uracil
  source 1..13: mol_type = other RNA
ttgtattctatgt

SEQ ID NO: 1329 - RNA, 12 nt, synthetic construct
  misc_feature 1..12: note = Synthetic oligonucleotide
  modified_base order(1,2,3,4,5,6,7,8,9,10,11,12): mod_base = OTHER; note = phosphorothioate (PS) backbone modification
  modified_base order(1,2,3,4,5,6,7,8,9,10,11,12): mod_base = OTHER; note = 2'-O-methoxyethyl (2 MOE)
  modified_base 8: mod_base = OTHER; note = 5-methyl cytosine
  modified_base order(1,2,4,6,7,9,11): mod_base = OTHER; note = 5-methyl uracil
  source 1..12: mol_type = other RNA
ttgtattctatg

SEQ ID NO: 1330 - RNA, 11 nt, synthetic construct
  misc_feature 1..11: note = Synthetic oligonucleotide
  modified_base order(1,2,3,4,5,6,7,8,9,10,11): mod_base = OTHER; note = phosphorothioate (PS) backbone modification
  modified_base order(1,2,3,4,5,6,7,8,9,10,11): mod_base = OTHER; note = 2'-O-methoxyethyl (2 MOE)
  modified_base 8: mod_base = OTHER; note = 5-methyl cytosine
  modified_base order(1,2,4,6,7,9,11): mod_base = OTHER; note = 5-methyl uracil
  source 1..11: mol_type = other RNA
ttgtattctat

SEQ ID NO: 1331 - RNA, 10 nt, synthetic construct
  misc_feature 1..10: note = Synthetic oligonucleotide
  modified_base order(1,2,3,4,5,6,7,8,9,10): mod_base = OTHER; note = phosphorothioate (PS) backbone modification
  modified_base order(1,2,3,4,5,6,7,8,9,10): mod_base = OTHER; note = 2'-O-methoxyethyl (2 MOE)
  modified_base 8: mod_base = OTHER; note = 5-methyl cytosine
  modified_base order(1,2,4,6,7,9): mod_base = OTHER; note = 5-methyl uracil
  source 1..10: mol_type = other RNA
ttgtattcta

SEQ ID NO: 1332-1335 - skipped (4 entries)

SEQ ID NO: 1336 - RNA, 14 nt, synthetic construct
  misc_feature 1..14: note = Synthetic oligonucleotide
  modified_base order(1,2,3,4,5,6,7,8,9,10,11,12,13,14): mod_base = OTHER; note = phosphorothioate (PS) backbone modification
  modified_base order(1,2,3,4,5,6,7,8,9,10,11,12,13,14): mod_base = OTHER; note = 2'-O-methoxyethyl (2 MOE)
  modified_base order(1,9,10,11,14): mod_base = OTHER; note = 5-methyl cytosine
  modified_base 7: mod_base = OTHER; note = 5-methyl uracil
  source 1..14: mol_type = other RNA
cggaagtacccaac

SEQ ID NO: 1337 - RNA, 14 nt, synthetic construct
  misc_feature 1..14: note = Synthetic oligonucleotide
  modified_base order(1,2,3,4,5,6,7,8,9,10,11,12,13,14): mod_base = OTHER; note = phosphorothioate (PS) backbone modification
  modified_base order(1,2,3,4,5,6,7,8,9,10,11,12,13,14): mod_base = OTHER; note = 2'-O-methoxyethyl (2 MOE)
  modified_base order(6,9): mod_base = OTHER; note = 5-methyl cytosine
  modified_base order(3,7,11,13): mod_base = OTHER; note = 5-methyl uracil
  source 1..14: mol_type = other RNA
aataactacgtgta

SEQ ID NO: 1338 - RNA, 14 nt, synthetic construct
  misc_feature 1..14: note = Synthetic oligonucleotide
  modified_base order(1,2,3,4,5,6,7,8,9,10,11,12,13,14): mod_base = OTHER; note = phosphorothioate (PS) backbone modification
  modified_base order(1,2,3,4,5,6,7,8,9,10,11,12,13,14): mod_base = OTHER; note = 2'-O-methoxyethyl (2 MOE)
  modified_base order(5,10,11): mod_base = OTHER; note = 5-methyl cytosine
  modified_base order(3,12): mod_base = OTHER; note = 5-methyl uracil
  source 1..14: mol_type = other RNA
aatacgaaacctga

SEQ ID NO: 1339 - RNA, 14 nt, synthetic construct
  misc_feature 1..14: note = Synthetic oligonucleotide
  modified_base order(1,2,3,4,5,6,7,8,9,10,11,12,13,14): mod_base = OTHER; note = phosphorothioate (PS) backbone modification
  modified_base order(1,2,3,4,5,6,7,8,9,10,11,12,13,14): mod_base = OTHER; note = 2'-O-methoxyethyl (2 MOE)
  modified_base order(2,5,8): mod_base = OTHER; note = 5-methyl cytosine
  modified_base order(7,12): mod_base = OTHER; note = 5-methyl uracil
  source 1..14: mol_type = other RNA
acgacatcaaataa

SEQ ID NO: 1340 - RNA, 14 nt, synthetic construct
  misc_feature 1..14: note = Synthetic oligonucleotide
  modified_base order(1,2,3,4,5,6,7,8,9,10,11,12,13,14): mod_base = OTHER; note = phosphorothioate (PS) backbone modification
  modified_base order(1,2,3,4,5,6,7,8,9,10,11,12,13,14): mod_base = OTHER; note = 2'-O-methoxyethyl (2 MOE)
  modified_base 13: mod_base = OTHER; note = 5-methyl cytosine
  modified_base order(4,7): mod_base = OTHER; note = 5-methyl uracil
  source 1..14: mol_type = other RNA
aaataataagaacg

SEQ ID NO: 1341 - RNA, 14 nt, synthetic construct
  misc_feature 1..14: note = Synthetic oligonucleotide
  modified_base order(1,2,3,4,5,6,7,8,9,10,11,12,13,14): mod_base = OTHER; note = phosphorothioate (PS) backbone modification
  modified_base order(1,2,3,4,5,6,7,8,9,10,11,12,13,14): mod_base = OTHER; note = 2'-O-methoxyethyl (2 MOE)
  modified_base order(1,2,5,6,9): mod_base = OTHER; note = 5-methyl cytosine
  modified_base order(8,13,14): mod_base = OTHER; note = 5-methyl uracil
  source 1..14: mol_type = other RNA
ccaaccatcggatt

SEQ ID NO: 1342 - RNA, 14 nt, synthetic construct
  misc_feature 1..14: note = Synthetic oligonucleotide
  modified_base order(1,2,3,4,5,6,7,8,9,10,11,12,13,14): mod_base = OTHER; note = phosphorothioate (PS) backbone modification
  modified_base order(1,2,3,4,5,6,7,8,9,10,11,12,13,14): mod_base = OTHER; note = 2'-O-methoxyethyl (2 MOE)
  modified_base order(1,4,5,6,8,14): mod_base = OTHER; note = 5-methyl cytosine
  modified_base order(3,7): mod_base = OTHER; note = 5-methyl uracil
  source 1..14: mol_type = other RNA
cgtccctcggggac

SEQ ID NO: 1343 - RNA, 14 nt, synthetic construct
  misc_feature 1..14: note = Synthetic oligonucleotide
  modified_base order(1,2,3,4,5,6,7,8,9,10,11,12,13,14): mod_base = OTHER; note = phosphorothioate (PS) backbone modification
  modified_base order(1,2,3,4,5,6,7,8,9,10,11,12,13,14): mod_base = OTHER; note = 2'-O-methoxyethyl (2 MOE)
  modified_base order(1,2,6,7,9,12,14): mod_base = OTHER; note = 5-methyl cytosine
  modified_base 13: mod_base = OTHER; note = 5-methyl uracil
  source 1..14: mol_type = other RNA
ccaaaccgcagctc

SEQ ID NO: 1344 - RNA, 14 nt, synthetic construct
  misc_feature 1..14: note = Synthetic oligonucleotide
  modified_base order(1,2,3,4,5,6,7,8,9,10,11,12,13,14): mod_base = OTHER; note = phosphorothioate (PS) backbone modification
  modified_base order(1,2,3,4,5,6,7,8,9,10,11,12,13,14): mod_base = OTHER; note = 2'-O-methoxyethyl (2 MOE)
  modified_base order(1,3,4,6,7,8,10,14): mod_base = OTHER; note = 5-methyl cytosine
  modified_base order(9,11): mod_base = OTHER; note = 5-methyl uracil
  source 1..14: mol_type = other RNA
cgccaccctctggc

SEQ ID NO: 1345 - RNA, 14 nt, synthetic construct
  misc_feature 1..14: note = Synthetic oligonucleotide
  modified_base order(1,2,3,4,5,6,7,8,9,10,11,12,13,14): mod_base = OTHER; note = phosphorothioate (PS) backbone modification
  modified_base order(1,2,3,4,5,6,7,8,9,10,11,12,13,14): mod_base = OTHER; note = 2'-O-methoxyethyl (2 MOE)
  modified_base order(1,3,4,5,6,7,8,10,13): mod_base = OTHER; note = 5-methyl cytosine
  modified_base 12: mod_base = OTHER; note = 5-methyl uracil
  source 1..14: mol_type = other RNA
caccccccacatcg

SEQ ID NO: 1346 - RNA, 14 nt, synthetic construct
  misc_feature 1..14: note = Synthetic oligonucleotide
  modified_base order(1,2,3,4,5,6,7,8,9,10,11,12,13,14): mod_base = OTHER; note = phosphorothioate (PS) backbone modification
  modified_base order(1,2,3,4,5,6,7,8,9,10,11,12,13,14): mod_base = OTHER; note = 2'-O-methoxyethyl (2 MOE)
  modified_base order(1,2,4,6,7,8,9,10,11,14): mod_base = OTHER; note = 5-methyl cytosine
  modified_base order(5,12): mod_base = OTHER; note = 5-methyl uracil
  source 1..14: mol_type = other RNA
ccgctcccccctac

SEQ ID NO: 1347 - RNA, 14 nt, synthetic construct
  misc_feature 1..14: note = Synthetic oligonucleotide
  modified_base order(1,2,3,4,5,6,7,8,9,10,11,12,13,14): mod_base = OTHER; note = phosphorothioate (PS) backbone modification
  modified_base order(1,2,3,4,5,6,7,8,9,10,11,12,13,14): mod_base = OTHER; note = 2'-O-methoxyethyl (2 MOE)
  modified_base order(3,5,13): mod_base = OTHER; note = 5-methyl cytosine
  modified_base order(11,12): mod_base = OTHER; note = 5-methyl uracil
  source 1..14: mol_type = other RNA
ggcacaaggattcg

SEQ ID NO: 1348 - RNA, 14 nt, synthetic construct
  misc_feature 1..14: note = Synthetic oligonucleotide
  modified_base order(1,2,3,4,5,6,7,8,9,10,11,12,13,14): mod_base = OTHER; note = phosphorothioate (PS) backbone modification
  modified_base order(1,2,3,4,5,6,7,8,9,10,11,12,13,14): mod_base = OTHER; note = 2'-O-methoxyethyl (2 MOE)
  modified_base order(11,12): mod_base = OTHER; note = 5-methyl cytosine
  modified_base order(3,5,13): mod_base = OTHER; note = 5-methyl uracil
  source 1..14: mol_type = other RNA
ggtgtggaagccta

SEQ ID NO: 1349 - RNA, 14 nt, synthetic construct
  misc_feature 1..14: note = Synthetic oligonucleotide
  modified_base order(1,2,3,4,5,6,7,8,9,10,11,12,13,14): mod_base = OTHER; note = phosphorothioate (PS) backbone modification
  modified_base order(1,2,3,4,5,6,7,8,9,10,11,12,13,14): mod_base = OTHER; note = 2'-O-methoxyethyl (2 MOE)
  modified_base order(6,14): mod_base = OTHER; note = 5-methyl cytosine
  modified_base order(4,5,10): mod_base = OTHER; note = 5-methyl uracil
  source 1..14: mol_type = other RNA
gagttcggatgggc

SEQ ID NO: 1350 - RNA, 14 nt, synthetic construct
  misc_feature 1..14: note = Synthetic oligonucleotide
  modified_base order(1,2,3,4,5,6,7,8,9,10,11,12,13,14): mod_base = OTHER; note = phosphorothioate (PS) backbone modification
  modified_base order(1,2,3,4,5,6,7,8,9,10,11,12,13,14): mod_base = OTHER; note = 2'-O-methoxyethyl (2 MOE)
  modified_base order(4,11,13,14): mod_base = OTHER; note = 5-methyl cytosine
  modified_base 9: mod_base = OTHER; note = 5-methyl uracil
  source 1..14: mol_type = other RNA
gagcggggtgcgcc

SEQ ID NO: 1351 - RNA, 14 nt, synthetic construct
  misc_feature 1..14: note = Synthetic oligonucleotide
  modified_base order(1,2,3,4,5,6,7,8,9,10,11,12,13,14): mod_base = OTHER; note = phosphorothioate (PS) backbone modification
  modified_base order(1,2,3,4,5,6,7,8,9,10,11,12,13,14): mod_base = OTHER; note = 2'-O-methoxyethyl (2 MOE)
  modified_base order(7,10): mod_base = OTHER; note = 5-methyl cytosine
  modified_base order(3,9,13): mod_base = OTHER; note = 5-methyl uracil
  source 1..14: mol_type = other RNA
ggtgggcgtcggtg

SEQ ID NO: 1352 - RNA, 14 nt, synthetic construct
  misc_feature 1..14: note = Synthetic oligonucleotide
  modified_base order(1,2,3,4,5,6,7,8,9,10,11,12,13,14): mod_base = OTHER; note = phosphorothioate (PS) backbone modification
  modified_base order(1,2,3,4,5,6,7,8,9,10,11,12,13,14): mod_base = OTHER; note = 2'-O-methoxyethyl (2 MOE)
  modified_base order(10,12): mod_base = OTHER; note = 5-methyl cytosine
  modified_base order(1,5,9,11,14): mod_base = OTHER; note = 5-methyl uracil
  source 1..14: mol_type = other RNA
tgggtaggtctcgt

SEQ ID NO: 1353 - RNA, 14 nt, synthetic construct
  misc_feature 1..14: note = Synthetic oligonucleotide
  modified_base order(1,2,3,4,5,6,7,8,9,10,11,12,13,14): mod_base = OTHER; note = phosphorothioate (PS) backbone modification
  modified_base order(1,2,3,4,5,6,7,8,9,10,11,12,13,14): mod_base = OTHER; note = 2'-O-methoxyethyl (2 MOE)
  modified_base order(5,6,10,12): mod_base = OTHER; note = 5-methyl cytosine
  modified_base order(1,2,4,8,9,13): mod_base = OTHER; note = 5-methyl uracil
  source 1..14: mol_type = other RNA
ttgtccgttcgcta

SEQ ID NO: 1354 - RNA, 14 nt, synthetic construct
  misc_feature 1..14: note = Synthetic oligonucleotide
  modified_base order(1,2,3,4,5,6,7,8,9,10,11,12,13,14): mod_base = OTHER; note = phosphorothioate (PS) backbone modification
  modified_base order(1,2,3,4,5,6,7,8,9,10,11,12,13,14): mod_base = OTHER; note = 2'-O-methoxyethyl (2 MOE)
  modified_base 6: mod_base = OTHER; note = 5-methyl cytosine
  modified_base order(1,3,5,8,10,11,13): mod_base = OTHER; note = 5-methyl uracil
  source 1..14: mol_type = other RNA
tatgtcgtattgta

SEQ ID NO: 1355 - RNA, 14 nt, synthetic construct
  misc_feature 1..14: note = Synthetic oligonucleotide
  modified_base order(1,2,3,4,5,6,7,8,9,10,11,12,13,14): mod_base = OTHER; note = phosphorothioate (PS) backbone modification
  modified_base order(1,2,3,4,5,6,7,8,9,10,11,12,13,14): mod_base = OTHER; note = 2'-O-methoxyethyl (2 MOE)
  modified_base order(6,8,10): mod_base = OTHER; note = 5-methyl cytosine
  modified_base order(1,3,4,7,11,12,13,14): mod_base = OTHER; note = 5-methyl uracil
  source 1..14: mol_type = other RNA
tattgctcgctttt

SEQ ID NO: 1356 - RNA, 14 nt, synthetic construct
  misc_feature 1..14: note = Synthetic oligonucleotide
  modified_base order(1,2,3,4,5,6,7,8,9,10,11,12,13,14): mod_base = OTHER; note = phosphorothioate (PS) backbone modification
  modified_base order(1,2,3,4,5,6,7,8,9,10,11,12,13,14): mod_base = OTHER; note = 2'-O-methoxyethyl (2 MOE)
  modified_base order(4,10): mod_base = OTHER; note = 5-methyl cytosine
  modified_base order(1,2,3,6,7,8,11,13,14): mod_base = OTHER; note = 5-methyl uracil
  source 1..14: mol_type = other RNA
tttcgtttgctgtt

SEQ ID NO: 1357 - RNA, 14 nt, synthetic construct
  misc_feature 1..14: note = Synthetic oligonucleotide
  modified_base order(1,2,3,4,5,6,7,8,9,10,11,12,13,14): mod_base = OTHER; note = phosphorothioate (PS) backbone modification
  modified_base order(1,2,3,4,5,6,7,8,9,10,11,12,13,14): mod_base = OTHER; note = 2'-O-methoxyethyl (2 MOE)
  modified_base 6: mod_base = OTHER; note = 5-methyl cytosine
  modified_base order(1,3,4,8,9,10,11,12,13,14): mod_base = OTHER; note = 5-methyl uracil
  source 1..14: mol_type = other RNA
tgttacgttttttt

SEQ ID NO: 1358 - RNA, 14 nt, synthetic construct
  misc_feature 1..14: note = Synthetic oligonucleotide
  modified_base order(1,2,3,4,5,6,7,8,9,10,11,12,13,14): mod_base = OTHER; note = phosphorothioate (PS) backbone modification
  modified_base order(1,2,3,4,5,6,7,8,9,10,11,12,13,14): mod_base = OTHER; note = 2'-O-methoxyethyl (2 MOE)
  modified_base order(10,11,12): mod_base = OTHER; note = 5-methyl cytosine
  modified_base order(4,5): mod_base = OTHER; note = 5-methyl uracil
  source 1..14: mol_type = other RNA
gggttaaaacccgg

SEQ ID NO: 1359 - RNA, 14 nt, synthetic construct
  misc_feature 1..14: note = Synthetic oligonucleotide
  modified_base order(1,2,3,4,5,6,7,8,9,10,11,12,13,14): mod_base = OTHER; note = phosphorothioate (PS) backbone modification
  modified_base order(1,2,3,4,5,6,7,8,9,10,11,12,13,14): mod_base = OTHER; note = 2'-O-methoxyethyl (2 MOE)
  modified_base order(3,7,8): mod_base = OTHER; note = 5-methyl cytosine
  modified_base order(12,14): mod_base = OTHER; note = 5-methyl uracil
  source 1..14: mol_type = other RNA
aacgaaccgagtgt

SEQ ID NO: 1360 - RNA, 14 nt, synthetic construct
  misc_feature 1..14: note = Synthetic oligonucleotide
  modified_base order(1,2,3,4,5,6,7,8,9,10,11,12,13,14): mod_base = OTHER; note = phosphorothioate (PS) backbone modification
  modified_base order(1,2,3,4,5,6,7,8,9,10,11,12,13,14): mod_base = OTHER; note = 2'-O-methoxyethyl (2 MOE)
  modified_base order(3,6): mod_base = OTHER; note = 5-methyl cytosine
  modified_base order(1,5,10): mod_base = OTHER; note = 5-methyl uracil
  source 1..14: mol_type = other RNA
tgcatcggatgaaa

SEQ ID NO: 1361 - RNA, 14 nt, synthetic construct
  misc_feature 1..14: note = Synthetic oligonucleotide
  modified_base order(1,2,3,4,5,6,7,8,9,10,11,12,13,14): mod_base = OTHER; note = phosphorothioate (PS) backbone modification
  modified_base order(1,2,3,4,5,6,7,8,9,10,11,12,13,14): mod_base = OTHER; note = 2'-O-methoxyethyl (2 MOE)
  modified_base order(2,11,13,14): mod_base = OTHER; note = 5-methyl cytosine
  source 1..14: mol_type = other RNA
acggaagaggcgcc

SEQ ID NO: 1362 - RNA, 14 nt, synthetic construct
  misc_feature 1..14: note = Synthetic oligonucleotide
  modified_base order(1,2,3,4,5,6,7,8,9,10,11,12,13,14): mod_base = OTHER; note = phosphorothioate (PS) backbone modification
  modified_base order(1,2,3,4,5,6,7,8,9,10,11,12,13,14): mod_base = OTHER; note = 2'-O-methoxyethyl (2 MOE)
  modified_base order(8,10): mod_base = OTHER; note = 5-methyl cytosine
  modified_base order(2,6): mod_base = OTHER; note = 5-methyl uracil
  source 1..14: mol_type = other RNA
gtaagtacgcaggg

SEQ ID NO: 1363 - RNA, 14 nt, synthetic construct
  misc_feature 1..14: note = Synthetic oligonucleotide
  modified_base order(1,2,3,4,5,6,7,8,9,10,11,12,13,14): mod_base = OTHER; note = phosphorothioate (PS) backbone modification
  modified_base order(1,2,3,4,5,6,7,8,9,10,11,12,13,14): mod_base = OTHER; note = 2'-O-methoxyethyl (2 MOE)
  modified_base 11: mod_base = OTHER; note = 5-methyl cytosine
  modified_base order(2,7,13): mod_base = OTHER; note = 5-methyl uracil
  source 1..14: mol_type = other RNA
gtaaagtgagcata

SEQ ID NO: 1364 - RNA, 14 nt, synthetic construct
  misc_feature 1..14: note = Synthetic oligonucleotide
  modified_base order(1,2,3,4,5,6,7,8,9,10,11,12,13,14): mod_base = OTHER; note = phosphorothioate (PS) backbone modification
  modified_base order(1,2,3,4,5,6,7,8,9,10,11,12,13,14): mod_base = OTHER; note = 2'-O-methoxyethyl (2 MOE)
  modified_base 8: mod_base = OTHER; note = 5-methyl cytosine
  modified_base order(3,14): mod_base = OTHER; note = 5-methyl uracil
  source 1..14: mol_type = other RNA
aatagagcgaggat

SEQ ID NO: 1365 - RNA, 14 nt, synthetic construct
  misc_feature 1..14: note = Synthetic oligonucleotide
  modified_base order(1,2,3,4,5,6,7,8,9,10,11,12,13,14): mod_base = OTHER; note = phosphorothioate (PS) backbone modification
  modified_base order(1,2,3,4,5,6,7,8,9,10,11,12,13,14): mod_base = OTHER; note = 2'-O-methoxyethyl (2 MOE)
  modified_base order(1,3): mod_base = OTHER; note = 5-methyl cytosine
  modified_base 10: mod_base = OTHER; note = 5-methyl uracil
  source 1..14: mol_type = other RNA
cgcagagaatgaaa

SEQ ID NO: 1366 - RNA, 14 nt, synthetic construct
  misc_feature 1..14: note = Synthetic oligonucleotide
  modified_base order(1,2,3,4,5,6,7,8,9,10,11,12,13,14): mod_base = OTHER; note = phosphorothioate (PS) backbone modification
  modified_base order(1,2,3,4,5,6,7,8,9,10,11,12,13,14): mod_base = OTHER; note = 2'-O-methoxyethyl (2 MOE)
  modified_base order(3,6,12,14): mod_base = OTHER; note = 5-methyl cytosine
  modified_base order(1,5,10,11,13): mod_base = OTHER; note = 5-methyl uracil
  source 1..14: mol_type = other RNA
tgcgtcgaattctc

SEQ ID NO: 1367 - RNA, 14 nt, synthetic construct
  misc_feature 1..14: note = Synthetic oligonucleotide
  modified_base order(1,2,3,4,5,6,7,8,9,10,11,12,13,14): mod_base = OTHER; note = phosphorothioate (PS) backbone modification
  modified_base order(1,2,3,4,5,6,7,8,9,10,11,12,13,14): mod_base = OTHER; note = 2'-O-methoxyethyl (2 MOE)
  modified_base order(2,4,10,12,14): mod_base = OTHER; note = 5-methyl cytosine
  modified_base order(1,5,6,8): mod_base = OTHER; note = 5-methyl uracil
  source 1..14: mol_type = other RNA
tcacttatgcacgc

SEQ ID NO: 1368 - RNA, 14 nt, synthetic construct
  misc_feature 1..14: note = Synthetic oligonucleotide
  modified_base order(1,2,3,4,5,6,7,8,9,10,11,12,13,14): mod_base = OTHER; note = phosphorothioate (PS) backbone modification
  modified_base order(1,2,3,4,5,6,7,8,9,10,11,12,13,14): mod_base = OTHER; note = 2'-O-methoxyethyl (2 MOE)
  modified_base order(1,2,9,14): mod_base = OTHER; note = 5-methyl cytosine
  modified_base order(3,4,6,7,13): mod_base = OTHER; note = 5-methyl uracil
  source 1..14: mol_type = other RNA
ccttattacagatc

SEQ ID NO: 1369 - RNA, 14 nt, synthetic construct
  misc_feature 1..14: note = Synthetic oligonucleotide
  modified_base order(1,2,3,4,5,6,7,8,9,10,11,12,13,14): mod_base = OTHER; note = phosphorothioate (PS) backbone modification
  modified_base order(1,2,3,4,5,6,7,8,9,10,11,12,13,14): mod_base = OTHER; note = 2'-O-methoxyethyl (2 MOE)
  modified_base order(3,4,5,6,14): mod_base = OTHER; note = 5-methyl cytosine
  modified_base order(1,2,7,8,11): mod_base = OTHER; note = 5-methyl uracil
  source 1..14: mol_type = other RNA
ttccccttgataac

SEQ ID NO: 1370 - RNA, 14 nt, synthetic construct
  misc_feature 1..14: note = Synthetic oligonucleotide
  modified_base order(1,2,3,4,5,6,7,8,9,10,11,12,13,14): mod_base = OTHER; note = phosphorothioate (PS) backbone modification
  modified_base order(1,2,3,4,5,6,7,8,9,10,11,12,13,14): mod_base = OTHER; note = 2'-O-methoxyethyl (2 MOE)
  modified_base order(1,2,7,13): mod_base = OTHER; note = 5-methyl cytosine
  modified_base order(3,4,5,6,8,12): mod_base = OTHER; note = 5-methyl uracil
  source 1..14: mol_type = other RNA
ccttttctagatcg

SEQ ID NO: 1371 - RNA, 14 nt, synthetic construct
  misc_feature 1..14: note = Synthetic oligonucleotide
  modified_base order(1,2,3,4,5,6,7,8,9,10,11,12,13,14): mod_base = OTHER; note = phosphorothioate (PS) backbone modification
  modified_base order(1,2,3,4,5,6,7,8,9,10,11,12,13,14): mod_base = OTHER; note = 2'-O-methoxyethyl (2 MOE)
  modified_base order(2,3,7,8,11,12): mod_base = OTHER; note = 5-methyl cytosine
  modified_base order(1,4,6,10,13): mod_base = OTHER; note = 5-methyl uracil
  source 1..14: mol_type = other RNA
tcctgtccatccta

SEQ ID NO: 1372 - RNA, 14 nt, synthetic construct
  misc_feature 1..14: note = Synthetic oligonucleotide
  modified_base order(1,2,3,4,5,6,7,8,9,10,11,12,13,14): mod_base = OTHER; note = phosphorothioate (PS) backbone modification
  modified_base order(1,2,3,4,5,6,7,8,9,10,11,12,13,14): mod_base = OTHER; note = 2'-O-methoxyethyl (2 MOE)
  modified_base order(3,10,12,13,14): mod_base = OTHER; note = 5-methyl cytosine
  modified_base order(1,2,4,6,8,11): mod_base = OTHER; note = 5-methyl uracil
  source 1..14: mol_type = other RNA
ttctatgtgctccc

SEQ ID NO: 1373 - RNA, 14 nt, synthetic construct
  misc_feature 1..14: note = Synthetic oligonucleotide
  modified_base order(1,2,3,4,5,6,7,8,9,10,11,12,13,14): mod_base = OTHER; note = phosphorothioate (PS) backbone modification
  modified_base order(1,2,3,4,5,6,7,8,9,10,11,12,13,14): mod_base = OTHER; note = 2'-O-methoxyethyl (2 MOE)
  modified_base order(3,5,6,10,14): mod_base = OTHER; note = 5-methyl cytosine
  modified_base order(1,4,7,8,9,12,13): mod_base = OTHER; note = 5-methyl uracil
  source 1..14: mol_type = other RNA
tactcctttcattc

SEQ ID NO: 1374 - RNA, 14 nt, synthetic construct
  misc_feature 1..14: note = Synthetic oligonucleotide
  modified_base order(1,2,3,4,5,6,7,8,9,10,11,12,13,14): mod_base = OTHER; note = phosphorothioate (PS) backbone modification
  modified_base order(1,2,3,4,5,6,7,8,9,10,11,12,13,14): mod_base = OTHER; note = 2'-O-methoxyethyl (2 MOE)
  modified_base order(3,10,11): mod_base = OTHER; note = 5-methyl cytosine
  modified_base order(4,6,7,9,13): mod_base = OTHER; note = 5-methyl uracil
  source 1..14: mol_type = other RNA
ggctattatccata

SEQ ID NO: 1375 - RNA, 14 nt, synthetic construct
  misc_feature 1..14: note = Synthetic oligonucleotide
  modified_base order(1,2,3,4,5,6,7,8,9,10,11,12,13,14): mod_base = OTHER; note = phosphorothioate (PS) backbone modification
  modified_base order(1,2,3,4,5,6,7,8,9,10,11,12,13,14): mod_base = OTHER; note = 2'-O-methoxyethyl (2 MOE)
  modified_base order(4,6,10): mod_base = OTHER; note = 5-methyl cytosine
  modified_base order(1,2,5): mod_base = OTHER; note = 5-methyl uracil
  source 1..14: mol_type = other RNA
ttactcaggcagga

SEQ ID NO: 1376 - RNA, 14 nt, synthetic construct
  misc_feature 1..14: note = Synthetic oligonucleotide
  modified_base order(1,2,3,4,5,6,7,8,9,10,11,12,13,14): mod_base = OTHER; note = phosphorothioate (PS) backbone modification
  modified_base order(1,2,3,4,5,6,7,8,9,10,11,12,13,14): mod_base = OTHER; note = 2'-O-methoxyethyl (2 MOE)
  modified_base order(6,9,10,13): mod_base = OTHER; note = 5-methyl cytosine
  modified_base order(2,4,12): mod_base = OTHER; note = 5-methyl uracil
  source 1..14: mol_type = other RNA
atgtgcaaccatcg

SEQ ID NO: 1377 - RNA, 14 nt, synthetic construct
  misc_feature 1..14: note = Synthetic oligonucleotide
  modified_base order(1,2,3,4,5,6,7,8,9,10,11,12,13,14): mod_base = OTHER; note = phosphorothioate (PS) backbone modification
  modified_base order(1,2,3,4,5,6,7,8,9,10,11,12,13,14): mod_base = OTHER; note = 2'-O-methoxyethyl (2 MOE)
  modified_base order(1,2,12): mod_base = OTHER; note = 5-methyl cytosine
  modified_base order(5,7,9,11): mod_base = OTHER; note = 5-methyl uracil
  source 1..14: mol_type = other RNA
ccggtgtatgtcaa

SEQ ID NO: 1378 - RNA, 14 nt, synthetic construct
  misc_feature 1..14: note = Synthetic oligonucleotide
  modified_base order(1,2,3,4,5,6,7,8,9,10,11,12,13,14): mod_base = OTHER; note = phosphorothioate (PS) backbone modification
  modified_base order(1,2,3,4,5,6,7,8,9,10,11,12,13,14): mod_base = OTHER; note = 2'-O-methoxyethyl (2 MOE)
  modified_base order(6,11,12): mod_base = OTHER; note = 5-methyl cytosine
  modified_base order(1,2,3,5,9): mod_base = OTHER; note = 5-methyl uracil
  source 1..14: mol_type = other RNA
tttgtcggtaccaa

SEQ ID NO: 1379 - RNA, 14 nt, synthetic construct
  misc_feature 1..14: note = Synthetic oligonucleotide
  modified_base order(1,2,3,4,5,6,7,8,9,10,11,12,13,14): mod_base = OTHER; note = phosphorothioate (PS) backbone modification
  modified_base order(1,2,3,4,5,6,7,8,9,10,11,12,13,14): mod_base = OTHER; note = 2'-O-methoxyethyl (2 MOE)
  modified_base order(1,3,9,11,12): mod_base = OTHER; note = 5-methyl cytosine
  modified_base order(2,4,13): mod_base = OTHER; note = 5-methyl uracil
  source 1..14: mol_type = other RNA
ctctaaggcacctg

SEQ ID NO: 1380 - RNA, 19 nt, synthetic construct
  misc_feature 1..19: note = Synthetic oligonucleotide
  modified_base order(1,2,3,17,18,19): mod_base = OTHER; note = phosphorothioate (PS) backbone modification
  modified_base order(2,4,7,8,9,10,11,13,15,17,19): mod_base = OTHER; note = 2'-fluoro
  modified_base order(1,3,5,6,12,14,16,18): mod_base = OTHER; note = 2'-O-methyl
  modified_base 5: mod_base = OTHER; note = C6x7 linker ((9H-fluoren-9-yl)methyl (4-((2S,4R)-2-((bis(4-methoxyphenyl)(phenyl)methoxy)methyl) -4-((bis(diisopropylamino)phosphanyl)oxy)pyrrolidin-1-yl)-4 -oxobutyl)carbamate)
  source 1..19: mol_type = other RNA
aggtgaaatgaagaaagta
